(19) United States
(12) Patent Application Publication
(10) Pub. No.: US 2004/0005667 A1
(43) Pub. Date: Jan. 8, 2004

(54) Immunisation against chlamydia pneumoniae

(76) Inventors: Giuloi Ratti, Siena (IT); Guido Grandi, Siena (IT)

Correspondence Address: Rebecca Hale, Chiron Corporation, Intellectual Property Law Department R 3, PO Box 8097, Emeryville, CA, 94662-8097, US

(21) Appl. No.: 10/312,273

(22) PCT Filed: Jul. 3, 2001
(86) PCT No.: PCT/IB01/01445

(30) Foreign Application Priority Data
Jul. 3, 2000 (GB) 0016363.4
Jul. 11, 2000 (GB) 0017047.2
Jul. 21, 2000 (GB) 0017938.8
Aug. 7, 2000 (GB) 0019368.0
Aug. 18, 2000 (GB) 0020440.4
Sep. 14, 2000 (GB) 0022583.9
Nov. 10, 2000 (GB) 0027549.5
Dec. 22, 2000 (GB) 0031706.5

(51) Int. Cl. C07K 14/295; A61K 39/02; C07H 21/04; C12P 21/02; C12N 1/21; C12N 15/74; C12N 15/09; C12N 1/20; C12N 15/00; C12N 15/63; C12N 15/70; C07K 1/00; C07K 14/00; C07K 17/00

(52) U.S. Cl. 435/69.3; 435/320.1; 435/252.3; 530/350; 424/190.1; 536/23.7

(57) ABSTRACT

The published genomic of Chlamydia pneumoniae reveals over 1000 putative encoded proteins but does not itself indicate which of these might to useful antigens for immunisation and vaccination or for diagnosis. This difficulty is addressed by the invention, which provides a number of C. pneumoniae protein sequences suitable for vaccine production and development and/or for diagnostic purposes.

[0001] All documents cited herein are incorporated by reference in their entirety.

### TECHNICAL FIELD

[0002] This invention is in the field of immunisation against chlamydial infection, in particular against infection by Chlamydia pneumoniae.

### BACKGROUND ART

[0003] Chlamydiae are obligate intracellular parasites of eukaryotic cells which are responsible for endemic sexually transmitted infections and various other disease syndromes. They occupy an exclusive eubacterial phylogenic branch, having no close relationship to any other known organisms—they are classified in their own order (Chlamydiales) which contains a single family (Chlamydiaceae) which in turn contains a single genus (Chlamydia). A particular characteristic of the Chlamydiae is their unique life cycle, in which the bacterium alternates between two morphologically distinct forms: an extracellular infective form (elementary bodies, EB) and an intracellular non-infective form (reticulate bodies, RB). The life cycle is completed with the re-organization of RB into EB, which subsequently leave the disrupted host cell ready to infect further cells.

[0004] Four chlamydial species are currently; known—C. trachomatis, C. pneunioniae, C. pecorum and C. psittaci [e.g. Raulston (1995) Mol Microbiol 15:607-616; Everett (2000) Vet Microbiol 75:109-126]. C. pneumoniae is closely related to C. trachomatis, as the whole genome comparison of at least two isolates from each species has shown [Kalman et al. (1999) Nature Genetics 21:385-389; Read et al. (2000) Nucleic Acids Res 28:1397-406; Stephens et al. (1998) Science 282:754-759]. Based on surface reaction with patient immune sera, the current view is that only one serotype of C. pneumoniae exists world-wide.

[0005] C. pneumoniae is a common cause of human respiratory disease. It was first isolated from the conjunctiva of a child in Taiwan in 1965, and was established as a major respiratory pathogen in 1983. In the USA, C. pneumoniae causes approximately 10% of community-acquired pneumonia and 5% of pharyngitis, bronchitis, and sinusitis.

[0006] More recently, the spectrum of C. pneumoniae infections has been extended to include atherosclerosis, coronary heart disease, carotid artery stenosis, myocardial infarction, cerebrovascular disease, aortic aneurysm, claudication, and stroke. The association of C. pneumoniae with atherosclerosis is corroborated by the presence of the organism in atherosclerotic lesions throughout the arterial tree and the near absence of the organism in healthy arterial tissue. C. pneumoniae has also been isolated from coronary and carotid atheromatous plaques. The bacterium has also been associated with other acute and chronic respiratory diseases (e.g. otitis media, chronic obstructive pulmonary disease, pulmonary exacerbation of cystic fibrosis) as a result of sero-epidemiologic observations, case reports, isolation or direct detection of the organism in specimens, and successful response to anti-chlamydial antibiotics. To determine whether chronic infection plays a role in initiation or progression of disease, intervention studies in humans have been initiated, and animal models of C. pneumoniae infection have been developed.

[0007] Considerable knowledge of the epidemiology of C. pneumoniae infection has been derived from serologic studies using the C. pneunioniae-specific microimmunofluorescence test. Infection is ubiquitous, and it is estimated that virtually everyone is infected at some point in life, with common re-infection. Antibodies against C. pneumoniae are rare in children under the age of 5, except in developing and tropical countries. Antibody prevalence increases rapidly at ages 5 to 14, reaching 50% at the age of 20, and continuing to increase slowly to ˜80% by age 70.

[0008] A current hypothesis is that C. pneumoniae can persist in an asymptomatic low-grade infection in very large sections of the human population. When this condition occurs, it believed that the presence of C. pneumoniae, and/or the effects of the host reaction to the bacterium, can cause or help progress of cardiovascular illness.

[0009] It is not yet clear whether C. pneumoniae is actually a causative agent of cardiovascular disease, or whether it is just artefactually associated with it. It has been shown, however, that C. pneumoniae infection can induce LDL oxidation by human monocytes [Kalayoglu et al. (1999) J. Infect. Dis. 180:780-90; Kalayoglu et al. (1999) Am. Heart J. 138:S488-490]. As LDL oxidation products are highly atherogenic, this observation provides a possible mechanism whereby C. pneumoniae may cause atheromatous degeneration. If a causative effect is confirmed, vaccination (prophylactic and therapeutic) will be universally recommended.

[0010] Genomic sequence information has been published for C. pneumoniae [Kalman et al. (1999) supra; Read et al. (2000) supra; Shirai et al. (2000) J. Infect. Dis. 181 (Suppl 3):S524-S527; WO99/27105; WO00/27994] and is available from GenBank. Sequencing efforts have not, however, focused on vaccination, and the availability of genomic sequence does not in itself indicate which of the >1000 genes might encode useful antigens for immunisation and vaccination. WO99/27105, for instance, implies that every one of the 1296 ORFs identified in the C. pneumoniae strain CM1 genome is a useful vaccine antigen.

[0011] It is thus an object of the present invention to identify antigens useful for vaccine production and development from amongst the many proteins present in C. pneumoniae. It is a further object to identify antigens useful for diagnosis (e.g. immunodiagnosis) of C. pneumoniae.

### DISCLOSURE OF THE INVENTION

[0012] The invention provides proteins comprising the C. pneumoniae amino acid sequences disclosed in the examples.

[0013] It also provides proteins comprising sequences which share at least x% sequence identity with the C. pneumoniae amino acid sequences disclosed in the examples. Depending on the particular sequence, x is preferably 50% or more (e.g. 60%, 70%, 80%, 90%, 95%, 99% or more). These include mutants and allelic variants. Typically, 50% identity or more between two proteins is considered to be an indication of functional equivalence. Identity between proteins is preferably determined by the Smith-Waterman homology search algorithm as implemented in the MPSRCH program (Oxford Molecular), using an affine gap search with parameters gap open penalty=12 and gap extension penalty=1.

[0014] The invention further provides proteins comprising fragments of the C. pneumoniae amino acid sequences disclosed in the examples. The fragments should comprise at least n consecutive amino acids from the sequences and, depending on the particular sequence, n is 7 or more (e.g. 8, 10, 12, 14, 16, 18, 20, 30, 40, 50, 75, 100 or more). Preferably the fragments comprise one or more epitope(s) from the sequence. Other preferred fragments omit a signal peptide.

[0015] The proteins of the invention can, of course, be prepared by various means (e.g. native expression, recombinant expression, purification from cell culture, chemical synthesis etc.) and in various forms (e.g. native, fusions etc.). They are preferably prepared in substantially pure form (i.e. substantially free from other C. pneumoniae or host cell proteins). Heterologous expression in E. coli is a preferred preparative route.

[0016] According to a further aspect, the invention provides nucleic acid comprising the C. pneumoniae nucleotide sequences disclosed in the examples. In addition, the invention provides nucleic acid comprising sequences which share at least x% sequence identity with the C. pneumoniae nucleotide sequences disclosed in the examples. Depending on the particular sequence, x is preferably 50% or more (e.g. 60%, 70%, 80%, 90%, 95%, 99% or more).

[0017] Furthermore, the invention provides nucleic acid which can hybridise to the C. pneumoniae nucleic acid disclosed in the examples, preferably under “high stringency” conditions (e.g. 65° C. in a 0.1×SSC, 0.5% SDS solution).

[0018] Nucleic acid comprising fragments of these sequences are also provided. These should comprise at least n consecutive nucleotides from the C. pneumoniae sequences and, depending on the particular sequence, n is 10 or more (e.g. 12, 14, 15, 18, 20, 25, 30, 35, 40, 50, 75, 100, 200, 300 or more).

[0019] According to a further aspect, the invention provides nucleic acid encoding the proteins and protein fragments of the invention.

[0020] It should also be appreciated that the invention provides nucleic acid comprising sequences complementary to those described above (e.g. for antisense or probing purposes).

[0021] Nucleic acid according to the invention can, of course, be prepared in many ways (e.g. by chemical synthesis, from genomic or cDNA libraries, from the organism itself etc.) and can take various forms (e.g. single stranded, double stranded, vectors, probes etc.).

[0022] In addition, the term “nucleic acid” includes DNA and RNA, and also their analogues, such as those containing modified backbones, and also peptide nucleic acids (PNA) etc.

[0023] According to a further aspect, the invention provides vectors comprising nucleotide sequences of the invention (e.g. cloning or expression vectors) and host cells transformed therewith.

[0024] According to a further aspect, the invention provides immunogenic compositions comprising protein and/or nucleic acid according to the invention. These compositions are suitable for immunisation and vaccination purposes. Vaccines of the invention may be prophylactic or therapeutic, and will typically comprise an antigen which can induce antibodies capable of inhibiting (a) chlamydial adhesion, (b) chlamydial entry, and/or (c) successful replication within the host cell. The vaccines preferably induce any cell-mediated T-cell responses which are necessary for chlamydial clearance from the host.

[0025] The invention also provides nucleic acid or protein according to the invention for use as medicaments (e.g. as vaccines). It also provides the use of nucleic acid or protein according to the invention in the manufacture of a medicament (e.g. a vaccine or an immunogenic composition) for treating or preventing infection due to C. pneumoniae.

[0026] The invention also provides a method of treating (e.g. immunising) a patient, comprising administering to the patient a therapeutically effective amount of nucleic acid or protein according to the invention.

[0027] According to further aspects, the invention provides various processes.

[0028] A process for producing proteins of the invention is provided, comprising the step of culturing a host cell according to the invention under conditions which induce protein expression.

[0029] A process for producing protein or nucleic acid of the invention is provided, wherein the protein or nucleic acid is synthesised in part or in whole using chemical means.

[0030] A process for detecting C. pneumoniae in a sample is provided, wherein the sample is contacted with an antibody which binds to a protein of the invention.

[0031] A summary of standard techniques and procedures which may be employed in order to perform the invention (e.g. to utilise the disclosed sequences for immunisation) follows. This summary is not a limitation on the invention but, rather, gives examples that may be used, but are not required.

[0032] General

[0033] The practice of the present invention will employ, unless otherwise indicated, conventional techniques of molecular biology, microbiology, recombinant DNA, and immunology, which are within the skill of the art. Such techniques are explained fully in the literature e.g. Sambrook Molecular Cloning; A Laboratory Manual, Second Edition (1989) and Third Edition (2001); DNA Cloning, Volumes I and ii (D. N Glover ed. 1985); Oligonucleotide Synthesis (M. J. Gait ed, 1984); Nucleic Acid Hybridization (B. D. Hames & S. J. Higgins eds. 1984); Transcription and Translation (B. D. Hames & S. J. Higgins eds. 1984); Animal Cell Culture (R. I. Freshney ed. 1986); Immobilized Cells and Enzymes (IRL Press, 1986); B. Perbal, A Practical Guide to Molecular Cloning (1984); the Methods in Enzymology series (Academic Press, Inc.), especially volumes 154 & 155; Gene Transfer Vectors for Mammalian Cells (J. H. Miller and M. P. Calos eds. 1987, Cold Spring Harbor Laboratory); Mayer and Walker, eds. (1987), Immunochemical Methods in Cell and Molecular Biology (Academic Press, London); Scopes, (1987) Protein Purification: Principles and Practice, Second Edition (Springer-Verlag, N.Y.), and Handbook of Experimental Immunology, Volumes I-IV (D. M. Weir and C. C. Blackwell eds 1986).

[0034] Standard abbreviations for nucleotides and amino acids are used in this specification.

[0035] Definitions

[0036] A composition containing X is “substantially free of” Y when at least 85% by weight of the total X+Y in the composition is X. Preferably, X comprises at least about 90% by weight of the total of X+Y in the composition, more preferably at least about 95% or even 99% by weight,

[0037] The term “comprising” means “including” as well as “consisting” e.g. a composition “comprising” X may consist exclusively of X or may include something additional to X, such as X+Y.

[0038] The term “heterologous” refers to two biological components that are not found together in nature. The components may be host cells, genes, or regulatory regions, such as promoters. Although the heterologous components are not found together in nature, they can function together, as when a promoter heterologous to a gene is operably linked to the gene. Another example is where a Chlamydial sequence is heterologous to a mouse host cell. A further examples would be two epitopes from the same or different proteins which have been assembled in a single protein in an arrangement not found in nature.

[0039] An “origin of replication” is a polynucleotide sequence that initiates and regulates replication of polynucleotides, such as an expression vector. The origin of replication behaves as an autonomous unit of polynucleotide replication within a cell, capable of replication under its own control. An origin of replication may be needed for a vector to replicate in a particular host cell. With certain origins of replication, an expression vector can be reproduced at a high copy number in the presence of the appropriate proteins within the cell. Examples of origins are the autonomously replicating sequences, which are effective in yeast; and the viral T-antigen, effective in COS-7 cells.

[0040] A “mutant” sequence is defined as DNA, RNA or amino acid sequence differing from but having sequence identity with the native or disclosed sequence. Depending on the particular sequence, the degree of sequence identity between the native or disclosed sequence and the mutant sequence is preferably greater than 50% (e.g. 60%, 70%, 80%, 90%, 95%, 99% or more, calculated using the Smith-Waterman algorithm as described above). As used herein, an “allelic variant” of a nucleic acid molecule, or region, for which nucleic acid sequence is provided herein is a nucleic acid molecule, or region, that occurs essentially at the same locus in the genome of another or second isolate, and that, due to natural variation caused by, for example, mutation or recombination, has a similar but not identical nucleic acid sequence. A coding region allelic variant typically encodes a protein having similar activity to that of the protein encoded by the gene to which it is being compared. An allelic variant can also comprise an alteration in the 5′ or 3′ untranslated regions of the gene, such as in regulatory control regions (e.g. see U.S. Pat. No. 5,753,235).

[0041] Expression Systems

[0042] The Chlamydial nucleotide sequences can be expressed in a variety of different expression systems; for example those used with mammalian cells, baculoviruses, plants, bacteria, and yeast.

[0043] i. Mammalian Systems

[0044] Mammalian expression systems are known in the art. A mammalian promoter is any DNA sequence capable of binding mammalian RNA polymerase and initiating the downstream (3′) transcription of a coding sequence (e.g. structural gene) into mRNA. A promoter will have a transcription initiating region, which is usually placed proximal to the 5′ end of the coding sequence, and a TATA box, usually located 25-30 base pairs (bp) upstream of the transcription initiation site. The TATA box is thought to direct RNA polymerase II to begin RNA synthesis at the correct site. A mammalian promoter will also contain an upstream promoter element, usually located within 100 to 200 bp upstream of the TATA box. An upstream promoter element determines the rate at which transcription is initiated and can act in either orientation [Sambrook et al. (1989) “Expression of Cloned Genes in Mammalian Cells.” In Molecular Cloning: A Laboratory Manual, 2nd ed.].

[0045] Mammalian viral genes are often highly expressed and have a broad host range; therefore sequences encoding mammalian viral genes provide particularly useful promoter sequences. Examples include the SV40 early promoter, mouse mammary tumor virus LTR promoter, adenovirus major late promoter (Ad MLP), and herpes simplex virus promoter. In addition, sequences derived from non-viral genes, such as the murine metallotheionein gene, also provide useful promoter sequences. Expression may be either constitutive or regulated (inducible), depending on the promoter can be induced with glucocorticoid in hormone-responsive cells.

[0046] The presence of an enhancer element (enhancer), combined with the promoter elements described above, will usually increase expression levels. An enhancer is a regulatory DNA sequence that can stimulate transcription up to 1000-fold when linked to homologous or heterologous promoters, with synthesis beginning at the normal RNA start site. Enhancers are also active when they are placed upstream or downstream from the transcription initiation site, in either normal or flipped orientation, or at a distance of more than 1000 nucleotides from the promoter [Maniatis et al. (1987) Science 236:1237; Alberts et al. (1989) Molecular Biology of the Cell, 2nd ed.]. Enhancer elements derived from viruses may be particularly useful, because they usually have a broader host range. Examples include the SV40 early gene enhancer [Dijkema et al (1985) EMBO J. 4:761] and the enhancer/promoters derived from the long terminal repeat (LTR) of the Rous Sarcoma Virus [Gorman et al. (1982) PNAS USA 79:6777] and from human cytomegalovirus [Boshart et al. (1985) Cell 41:521.] Additionally, some enhancers are regulatable and become active only in the presence of an inducer, such as a hormone or metal ion [Sassone-Corsi and Borelli (1986) Trends Genet. 2:215; Maniatis et al. (1987) Science 236:1237].

[0047] A DNA molecule may be expressed intracellularly in mammalian cells. A promoter sequence may be directly linked with the DNA molecule, in which case the first amino acid at the N-terminus of the recombinant protein will always be a methionine, which is encoded by the ATG start codon. If desired, the N-terminus may be cleaved from the protein by in vitro incubation with cyanogen bromide.

[0048] Alternatively, foreign proteins can also be secreted from the cell into the growth media by creating chimeric DNA molecules that encode a fusion protein comprised of a leader sequence fragment that provides for secretion of the foreign protein in mammalian cells. Preferably, there are processing sites encoded between the leader fragment and the foreign gene that can be cleaved either in vivo or in vitro. The leader sequence fragment usually encodes a signal peptide comprised of hydrophobic amino acids which direct the secretion of the protein from the cell. The adenovirus triparite leader is an example of a leader sequence that provides for secretion of a foreign protein in mammalian cells.

[0049] Usually, transcription termination and polyadenylation sequences recognized by mammalian cells are regulatory regions located 3′ to the translation stop codon and thus, together with the promoter elements, flank the coding sequence. The 3′ terminus of the mature mRNA is formed by site-specific post-transcriptional cleavage and polyadenylation [Birnstiel et al. (1985) Cell 41:349; Proudfoot and Whitelaw (1988) “Termination and 3′ end processing of eukaryotic RNA. In Transcription and splicing (ed. B. D. Hames and D. M. Glover); Proudfoot (1989) Trends Biochem. Sci. 14:105]. These sequences direct the transcription of an mRNA which can be translated into the polypeptide encoded by the DNA. Examples of transcription terminater/polyadenylation signals include those derived from SV40 [Sambrook et al (1989) “Expression of cloned genes in cultured mammalian cells.” In Molecular Cloning: A Laboratory Manual].

[0050] Usually, the above described components, comprising a promoter, polyadenylation signal, and transcription termination sequence are put together into expression constructs. Enhancers, introns with functional splice donor and acceptor sites, and leader sequences may also be included in an expression construct, if desired. Expression constructs are often maintained in a replicon, such as an extrachromosomal element (e.g. plasmids) capable of stable maintenance in a host, such as mammalian cells or bacteria. Mammalian replication systems include those derived from animal viruses, which require trans-acting factors to replicate. For example, plasmids containing the replication systems of papovaviruses, such as SV40 [Gluzman (1981) Cell 23:175] or polyomavirus, replicate to extremely high copy number in the presence of the appropriate viral T antigen. Additional examples of mammalian replicons include those derived from bovine papillomavirus and Epstein-Barr virus. Additionally, the replicon may have two replicaton systems, thus allowing it to be maintained, for example, in mammalian cells for expression and in a prokaryotic host for cloning and amplification. Examples of such mammalian-bacteria shuttle vectors include pMT2 [Kaufman et al. (1989) Mol. Cell. Biol. 9:946] and pHEBO [Shimizu et al. (1986) Mol. Cell. Biol. 6:1074].

[0051] The transformation procedure used depends upon the host to be transformed. Methods for introduction of heterologous polynucleotides into mammalian cells are known in the art and include dextran-mediated transfection, calcium phosphate precipitation, polybrene-mediated transfection, protoplast fusion, electroporation, encapsulation of polynucleotide(s) in liposomes, direct microinjection of the DNA into nuclei.

[0052] Mammalian cell lines available as hosts for expression are known in the art and include many immortalized cell lines available from the American Type Culture Collection (ATCC), including but not limited to, Chinese hamster ovary (CHO) cells, HeLa cells, baby hamster kidney (BHK) cells, monkey kidney cells (COS), human hepatocellular carcinoma cells (e.g. Hep G2), and a number of other cell lines.

[0053] ii. Baculovirus Systems

[0054] The polynucleotide encoding the protein can also be inserted into a suitable insect expression vector, and is, operably linked to the control elements within that vector. Vector construction employs techniques which are known in the art. Generally, the components of the expression system include a transfer vector, usually a bacterial plasmid, which contains both a fragment of the baculovirus genome, and a convenient restriction site for insertion of the heterologous gene or genes to be expressed; a wild type baculovirus with a sequence homologous to the baculovirus-specific fragment in the transfer vector (this allows for the homologous recombination of the heterologous gene in to the baculovirus genome); and appropriate insect host cells and growth media,

[0055] After inserting the DNA sequence encoding the protein into the transfer vector, the vector and the wild type viral genome are transfected into an insect host cell where the vector and viral genome are allowed to recombine. The packaged recombinant virus is expressed and recombinant plaques are identified and purified. Materials and methods for baculovirus/insect cell expression systems are commercially available in kit form from, inter alia, Invitrogen, San Diego, Calif. (“MaxBac” kit). These techniques are generally known to those skilled in the art and fully described in Summers and Smith, Texas Agricultural Experiment Station Bulletin No. 1555 (1987) (hereinafter “Summers and Smith”).

[0056] Prior to inserting the DNA sequence encoding the protein into the baculovirus genome, the above described components, comprising a promoter, leader (if desired), coding sequence of interest, and transcription termination sequence, are usually assembled into an intermediate transplacement construct (transfer vector). This construct may contain a single gene and operably linked regulatory elements; multiple genes, each with its owned set of operably linked regulatory elements; or multiple genes, regulated by the same set of regulatory elements. Intermediate transplacement constructs are often maintained in a replicon, such as an extrachromosomal element (e.g. plasmids) capable of stable maintenance in a host, such as a bacterium. The replicon will have a replication system, thus allowing it to be maintained in a suitable host for cloning and amplification.

[0057] Currently, the most commonly used transfer vector for introducing foreign genes into AcNPV is pAc373. Many other vectors, known to those of skill in the art, have also been designed. These include, for example, pVL985 (which alters the polyhedrin start codon from ATO to ATT, and which introduces a BamHI cloning site 32 basepairs downstream from the ATT; see Luckow and Summers, Virology (1989)17:31.

[0058] The plasmid usually also contains the polyhedrin polyadenylation signal (Miller et al. (1988) Ann. Rev. Microbiol., 42:177) and a prokaryotic ampicillin-resistance (amp) gene and origin of replication for selection and propagation in E. coli.

[0059] Baculovirus transfer vectors usually contain a baculovirus promoter. A baculovirus promoter is any DNA sequence capable of binding a baculovirus RNA polymerase and initiating the downstream (5′ to 3′) transcription of a coding sequence (e.g. structural gene) into mRNA. A promoter will have a transcription initiation region which is usually placed proximal to the 5′ end of the coding sequence. This transcription initiation region usually includes an RNA polymerase binding site and a transcription initiation site. A baculovirus transfer vector may also have a second domain called an enhancer, which, if present, is usually distal to the structural gene. Expression may be either regulated or constitutive.

[0060] Structural genes, abundantly transcribed at late times in a viral infection cycle, provide particularly useful promoter sequences. Examples include sequences derived from the gene encoding the viral polyhedron protein, Friesen et al., (1986) “The Regulation of Baculovirus Gene Expression,” in: The Molecular Biology of Baculoviruses (ed. Walter Doerfler); EPO Publ. Nos. 127 839 and 155 476; and the gene encoding the p10 protein, Vlak et al., (1988), J. Gen. Virol. 69:765.

[0061] DNA encoding suitable signal sequences can be derived from genes for secreted insect or baculovirus proteins, such as the baculovirus polyhedrin gene (Carbonell et al. (1988) Gene, 73:409). Alternatively, since the signals for mammalian cell posttranslational modifications (such as signal peptide cleavage, proteolytic cleavage, and phosphorylation) appear to be recognized by insect cells, and the signals required for secretion and nuclear accumulation also appear to be conserved between the invertebrate cells and vertebrate cells, leaders of non-insect origin, such as those derived from genes encoding human α-interferon, Maeda et al., (1985), Nature 315:592; human gastrin-releasing peptide, Lebacq-Verheyden et al., (1988), Molec. Cell. Biol. 8:3129; human IL-2, Smith et al., (1985) Proc. Nat'l Acad. Sci. USA, 82:8404; mouse IL-3, (Miyajima et al., (1987) Gene 58:273; and human glucocerebrosidase, Martin et al. (1988) DNA, 7:99, can also be used to provide for secretion in insects.

[0062] A recombinant polypeptide or polyprotein may be expressed intracellularly or, if it is expressed with the proper regulatory sequences, it can be secreted. Good intracellular expression of nonfused foreign proteins usually requires heterologous genes that ideally have a short leader sequence containing suitable translation initiation signals preceding an ATG start signal. If desired, methionine at the N-terminus may be cleaved from the mature protein by in vitro incubation with cyanogen bromide.

[0063] Alternatively, recombinant polyproteins or proteins which are not naturally secreted can be secreted from the insect-cell by creating chimeric DNA molecules that encode a fusion protein comprised of a leader sequence fragment that provides for secretion of the foreign protein in insects. The leader sequence fragment usually encodes a signal peptide comprised of hydrophobic amino acids which direct the translocation of the protein into the endoplasmic reticulum.

[0064] After insertion of the DNA sequence and/or the gene encoding the expression product precursor of the protein, an insect cell host is co-transformed with the heterologous DNA of the transfer vector and the genomic DNA of wild type baculovirus—usually by co-transfection. The promoter and transcription termination sequence of the construct will usually comprise a 2-5 kb section of the baculovirus genome. Methods for introducing heterologous DNA into the desired site in the baculovirus virus are known in the art. (See Summers and Smith supra; Ju et al. (1987); Smith et al., Mol. Cell. Biol. (1983) 3:2156; and Luckow and Summers (1989)). For example, the insertion can be into a gene such as the polyhedrin gene, by homologous double crossover recombination; insertion can also be into a restriction enzyme site engineered into the desired baculovirus gene. Miller et al., (1989), Bioessays 4:91.The DNA sequence, when cloned in place of the polyhedrin gene in the expression vector, is flanked both 5′ and 3′ by polyhedrin-specific sequences and is positioned downstream of the polyhedrin promoter.

[0065] The newly formed baculovirus expression vector is subsequently packaged into an infectious recombinant baculovirus. Homologous recombination occurs at low frequency (between ˜1% and ˜5%); thus, the majority of the virus produced after cotransfection is still wild-type virus. Therefore, a method is necessary to identify recombinant viruses. An advantage of the expression system is a visual screen allowing recombinant viruses to be distinguished. The polyhedrin protein, which is produced by the native virus, is produced at very high levels in the nuclei of infected cells at late times after viral infection. Accumulated polyhedrin protein forms occlusion bodies that also contain embedded particles. These occlusion bodies, up to 15 μm in size, are highly refractile, giving them a bright shiny appearance that is readily visualized under the light microscope. Cells infected with recombinant viruses lack occlusion bodies. To distinguish recombinant virus from wild-type virus, the transfection supernatant is plaqued onto a monolayer of insect cells by techniques known to those skilled in the art. Namely, the plaques are screened under the light microscope for the presence (indicative of wild-type virus) or absence (indicative of recombinant virus). of occlusion bodies. “Current Protocols in Microbiology” Vol. 2 (Ausubel et al. eds) at 16.8 (Supp. 10, 1990); Summers & Smith, supra; Miller et al. (1989).

[0066] Recombinant baculovirus expression vectors have been developed for infection into several insect cells. For example, recombinant baculoviruses have been developed for, inter alia: Aedes aegypti, Autographa californica, Bombyx mori, Drosophila melanogaster, Spodoptera frugiperda, and Trichoplusia ni (WO 89/046699; Carbonell et al., (1985) J. Virol. 56:153; Wright (1986) Nature 321:718; Smith et al., (1983) Mol. Cell. Biol. 3:2156; and see generally, Fraser, et al. (1989) In Vitro Cell. Dev. Biol. 25:225).

[0067] Cells and cell culture media are commercially available for both direct and fusion expression of heterologous polypeptides in a baculovirus/expression system; cell culture technology is generally known to those skilled in the art. See, e.g. Summers and Smith supra.

[0068] The modified insect cells may then be grown in an appropriate nutrient medium, which allows for stable maintenance of the plasmid(s) present in the modified insect host. Where the expression product gene is under inducible control, the host may be grown to high density, and expression induced. Alternatively, where expression is constitutive, the product will be continuously expressed into the medium and the nutrient medium must be continuously circulated, while removing the product of interest and augmenting depleted nutrients. The product may be purified by such techniques as chromatography, e.g. HPLC, affinity chromatography, ion exchange chromatography, etc.; electrophoresis; density gradient centrifugation; solvent extraction, or the like. As appropriate, the product may be further purified, as required, so as to remove substantially any insect proteins which are also secreted in the medium or result from lysis of insect cells, so as to provide a product which is at least substantially free of host debris, e.g. proteins, lipids and polysaccharides.

[0069] In order to obtain protein expression, recombinant host cells derived from the transformants are incubated under conditions which allow expression of the recombinant protein encoding sequence. These conditions will vary, dependent upon the host cell selected. However, the conditions are readily ascertainable to those of ordinary skill in the art, based upon what is known in the art.

[0070] iii. Plant Systems

[0071] There are many plant cell culture and whole plant genetic expression systems known in the art. Exemplary plant cellular genetic expression systems include those described in patents, such as: U.S. Pat. No. 5,693,506; U.S. Pat. No. 5,659,122; and U.S. Pat. No. 5,608,143. Additional examples of genetic expression in plant cell culture has been described by Zenk, Phytochemistry 30:3861-3863 (1991). Descriptions of plant protein signal peptides may be found in addition to the references described above in Vaulcombe et al., Mol. Gen. Genet. 209:33-40 (1987); Chandler et al., Plant Molecular Biology 3:407-418 (1984); Rogers, J. Biol. Chem. 260:3731-3738 (1985); Rothstein et al., Gene 55:353-356 (1987); Whittier et al., Nucleic Acids Research 15:2515-2535 (1987); Wirsel et al., Molecular Microbiology 3:3-14 (1989); Yu et al., Gene 122:247-253 (1992). A description of the regulation of plant gene expression by the phytohormone, gibberellic acid and secreted enzymes induced by gibberellic acid can be found in R. L. Jones and J. MacMillin, Gibberellins: in: Advanced Plant Physiology,. Malcolm B. Wilkins, ed., 1984 Pitman Publishing Limited, London, pp. 21-52. References that describe other metabolically-regulated genes: Sheen, Plant Cell, 2:1027-1038(1990); Maas et al., EMBO J. 9:3447-3452 (1990); Benkel and Hickey, Proc. Natl. Acad. Sci. 84:1337-1339 (1987)

[0072] Typically, using techniques known in the art, a desired polynucleotide sequence is inserted into an expression cassette comprising genetic regulatory elements designed for operation in plants. The expression cassette is inserted into a desired expression vector with companion sequences upstream and downstream from the expression cassette suitable for expression in a plant host. The companion sequences will be of plasmid or viral origin and provide necessary characteristics to the vector to permit the vectors to move DNA from an original cloning host, such as bacteria, to the desired plant host. The basic bacterial/plant vector construct will preferably provide a broad host range prokaryote replication origin; a prokaryote selectable marker; and, for Agrobacterium transformations, T DNA sequences for Agrobacterium-mediated transfer to plant chromosomes. Where the heterologous gene is not readily amenable to detection, the construct will preferably also have a selectable marker gene suitable for determining if a plant cell has been transformed. A general review of suitable markers, for example for the members of the grass family, is found in Wilmink and Dons, 1993, Plant Mol. Biol. Reptr, 11(2):165-185.

[0073] Sequences suitable for permitting integration of the heterologous sequence into the plant genome are also recommended. These might include transposon sequences and the like for homologous recombination as well as Ti sequences which permit random insertion of a heterologous expression cassette into a plant genome,. Suitable prokaryote selectable markers include resistance toward antibiotics such as ampicillin or tetracycline. Other DNA sequences encoding additional functions may also be present in the vector, as is known in the art.

[0074] The nucleic acid molecules of the subject invention may be included into an expression cassette for expression of the protein(s) of interest. Usually, there will be only one expression cassette, although two or more are feasible. The recombinant expression cassette will contain in addition to the heterologous protein encoding sequence the following elements, a promoter region, plant 5′ untranslated sequences, initiation codon depending upon whether or not the structural gene comes equipped with one, and a transcription and translation termination sequence. Unique restriction enzyme sites at the 5′ and 3′ ends of the cassette allow for easy insertion into a pre-existing vector.

[0075] A heterologous coding sequence may be for any protein relating to the present invention. The sequence encoding the protein of interest will encode a signal peptide which allows processing and translocation of the protein, as appropriate, and will usually lack any sequence which might result in the binding of the desired protein of the invention to a membrane. Since, for the most part, the transcriptional initiation region will be for a gene which is expressed and translocated during germination, by employing the signal peptide which provides for translocation, one may also provide for translocation of the protein of interest. In this way, the protein(s) of interest will be translocated from the cells in which they are expressed and may be efficiently harvested. Typically secretion in seeds are across the aleurone or scutellar epithelium layer into the endosperm of the seed. While it is not required that the protein be secreted from the cells in which the protein is produced, this facilitates the isolation and purification of the recombinant protein.

[0076] Since the ultimate expression of the desired gene product will be in a eucaryotic cell it is desirable to determine whether any portion of the cloned gene contains sequences which will be processed out as introns by the host's splicosome machinery. If so, site-directed mutagenesis of the “intron” region may be conducted to prevent losing a portion of the genetic message as a false intron code, Reed and Maniatis, Cell 41:95-105, 1985.

[0077] The vector can be microinjected directly into plant cells by use of micropipettes to mechanically transfer the recombinant DNA. Crossway, Mol. Gen. Genet, 202:179-185, 1985. The genetic material may also be transferred into the plant cell by using polyethylene glycol, Krens, et al., Nature, 296, 72-74, 1982. Another method of introduction of nucleic acid segments is high velocity ballistic penetration by small particles with the nucleic acid either within the matrix of small beads or particles, or on the surface, Klein, et al., Nature, 327, 70-73, 1987 and Knudsen and Muller, 1991, Planta, 185:330-336 teaching particle bombardment of barley endosperm to create transgenic barley. Yet another method of introduction would be fusion of protoplasts with other entities, either minicells, cells, lysosomes or other fusible lipid-surfaced bodies, Fraley, et al., Proc. Natl. Acad. Sci. USA, 79, 1859-1863, 1982.

[0078] The vector may also be introduced into the plant cells by electroporation. (Fromm et al., Proc. Natl Acad. Sci. USA 82:5824, 1985). In this technique, plant protoplasts are electroporated in the presence of plasmids containing the gene construct. Electrical impulses of high field strength reversibly permeabilize biomembranes allowing the introduction of the plasmids. Electroporated plant protoplasts reform the cell wall, divide, and form plant callus.

[0079] All plants from which protoplasts can be isolated and cultured to give whole regenerated plants can be transformed by the present invention so that whole plants are recovered which contain the transferred gene. It is known that practically all plants can be regenerated from cultured cells or tissues, including but not limited to all major species of sugarcane, sugar beet, cotton, fruit and other trees, legumes and vegetables. Some suitable plants include, for example, species from the genera Fragaria, Lotus, Medicago, Onobrychis, Trifolium, Trigonella, Vigna, Citrus, Linum, Geranium, Manihot, Daucus, Arabidopsis, Brassica, Raphanus, Sinapis, Atropa, Capsicum, Datura, Hyoscyamus, Lycopersion, Nicotiana, Solanum, Petunia, Digitalis, Majorana, Cichorium, Helianthus, Lactuca, Bromus, Asparagus, Antirrhinum, Hererocallis, Nemesia, Pelargonium, Panicum, Pennisetum, Ranunculus, Senecio, Salpiglossis, Cucumis, Browaalia, Glycine, Lolium, Zea, Triticum, Sorghum, and Datura.

[0080] Means for regeneration vary from species to species of plants, but generally a suspension of transformed protoplasts containing copies of the heterologous gene is first provided. Callus tissue is formed and shoots may be induced from callus and subsequently rooted. Alternatively, embryo formation can be induced from the protoplast suspension, These embryos germinate as natural embryos to form plants. The culture media will generally contain various amino acids and hormones, such as auxin and cytokinins. It is also advantageous to add glutamic acid and proline to the medium, especially for such species as corn and alfalfa. Shoots and roots normally develop simultaneously. Efficient regeneration will depend on the medium, on the genotype, and on the history of the culture. If these three variables are controlled, then regeneration is fully reproducible and repeatable.

[0081] In some plant cell culture systems, the desired protein of the invention may be excreted or alternatively, the protein may be extracted from the whole plant. Where the desired protein of the invention is secreted into the medium, it may be collected. Alternatively, the embryos and embryoless-half seeds or other plant tissue may be mechanically disrupted to release any secreted protein between cells and tissues. The mixture may be suspended in a buffer solution to retrieve soluble proteins. Conventional protein isolation and purification methods will be then used to purify the recombinant protein. Parameters of time, temperature pH, oxygen, and volumes will be adjusted through routine methods to optimize expression and recovery of heterologous protein.

[0082] iv. Bacterial Systems

[0083] Bacterial expression techniques are known in the art. A bacterial promoter is any DNA sequence capable of binding bacterial RNA polymerase and initiating the downstream (3′) transcription of a coding sequence (e.g. structural gene) into mRNA. A promoter will have a transcription initiation region which is usually placed proximal to the 5′ end of the coding sequence. This transcription initiation region usually includes an RNA polymerase binding site and a transcription initiation site. A bacterial promoter may also have a second domain called an operator, that may overlap an adjacent RNA polymerase binding site at which RNA synthesis begins. The operator permits negative regulated (inducible) transcription, as a gene repressor protein may bind the operator and thereby inhibit transcription of a specific gene. Constitutive expression may occur in the absence of negative regulatory elements, such as the operator. In addition, positive regulation may be achieved by a gene activator protein binding sequence, which, if present is usually proximal (5′) to the RNA polymerase binding sequence. An example of a gene activator protein is the catabolite activator protein (CAP), which helps initiate transcription of the lac operon in Escherichia coli (E. coli) [Raibaud et al. (1984) Annu. Rev. Genet. 18:173]. Regulated expression may therefore be either positive or negative, thereby either enhancing or reducing transcription.

[0084] Sequences encoding metabolic pathway enzymes provide particularly useful promoter sequences. Examples include promoter sequences derived from sugar metabolizing enzymes, such as galactose, lactose (lac) [Chang et al. (1977) Nature 198:1056], and maltose. Additional examples include promoter sequences derived from biosynthetic enzymes such as tryptophan (trp) [Goeddel et al. (1980) Nuc. Acids Res. 8:4057; Yelverton et al. (1981) Nucl. Acids Res. 9:731; U.S. Pat. No. 4,738,921; EP-A-0036776 and EP-A-0121775]. The g-laotamase (bla) promoter system [Weissmann (1981) “The cloning of interferon and other mistakes.” In Interferon 3 (ed. I. Gresser)], bacteriophage lambda PL [Shimatake et al. (1981) Nature 292:128] and T5 [U.S. Pat. No. 4,689,406] promoter systems also provide useful promoter sequences.

[0085] In addition, synthetic promoters which do not occur in nature also function as bacterial promoters. For example, transcription activation sequences of one bacterial or bacteriophage promoter may be joined with the operon sequences of another bacterial or bacteriophage promoter, creating a synthetic hybrid promoter [U.S. Pat. No. 4,551,433]. For example, the tac promoter is a hybrid trp-lac promoter comprised of both trp promoter and lac operon sequences that is regulated by the lac repressor [Amann et al. (1983) Gene 25:167; de Boer et al. (1983) Proc. Natl. Acad. Sci. 80:21]. Furthermore, a bacterial promoter can include naturally occurring promoters of non-bacterial origin that have the ability to bind bacterial RNA polymerase and initiate transcription. A naturally occurring promoter of non-bacterial origin can also be coupled with a compatible RNA polymerase to produce high levels of expression of some genes in prokaryotes. The bacteriophage T7 RNA polymerase/promoter system is an example of a coupled promoter system [Studier et al. (1986) J. Mol. Biol. 189:113; Tabor et al. (1985) Proc Natl. Acad. Sci. 82:1074]. In addition, a hybrid promoter can also be comprised of a bacteriophage promoter and an E. coli operator region (EPO-A-0 267 851).

[0086] In addition to a functioning promoter sequence, an efficient ribosome binding site is also useful for the expression of foreign genes in prokaryotes. In E. coli, the ribosome binding site is called the Shine-Dalgarno (SD) sequence and includes an initiation codon (ATG) and a sequence 3-9 nucleotides in length located 3-11 nucleotides upstream of (he initiation codon [Shine et al. (1975) Nature 254:34]. The SD sequence is thought to promote binding of mRNA to the ribosome by the pairing of bases between the SD sequence and the 3′ and of E. coli 16S rRNA [Steitz et al. (1979) “Genetic signals and nucleotide sequences in messenger RNA.” In Biological Regulation and Development: Gene Expression (ed, R. F. Goldberger)]. To express eukaryotic genes and prokaryotic genes with weak ribosome-binding site [Sambrook et al. (1989) “Expression of cloned genes in Escherichia coli.” In Molecular Cloning: A Laboratory Manual].

[0087] A DNA molecule may be expressed intracellularly. A promoter sequence may be directly linked with the DNA molecule, in which case the first amino acid at the N-terminus will always be a methionine, which is encoded by the ATG start codon. If desired, methionine at the N-terminus may be cleaved from the protein by in vitro incubation with cyanogen bromide or by either in vivo on in vitro incubation with a bacterial methionine N-terminal peptidase (EPO-A-0 219 237).

[0088] Fusion proteins provide an alternative to direct expression. Usually, a DNA sequence encoding the N-terminal portion of an endogenous bacterial protein, or other stable protein, is fused to the 5′ end of heterologous coding sequences. Upon expression, this construct will provide a fusion of the two amino acid sequences. For example, the bacteriophage lambda cell gene can be linked at the 5′ terminus of a foreign gene and expressed in bacteria. The resulting fusion protein preferably retains a site for a processing enzyme (factor Xa) to cleave the bacteriophage protein from the foreign gene [Nagai et al. (1984) Nature 309:810]. Fusion proteins can also be made with sequences from the lacZ [Jia et al. (1987) Gene 60:1971, trpE [Allen et al. (1987) J. Biotechnol. 5:93; Makoff et al. (1989) J. Gen. Microbiol. 135:11], and Chey [EP-A-0 324 647] genes. The DNA sequence at the junction of the two amino acid sequences may or may not encode a cleavable site. Another example is a ubiquitin fusion protein. Such a fusion protein is made with the ubiquitin region that preferably retains a site for a processing enzyme (e.g. ubiquitin specific processing-protease) to cleave the ubiquitin from the foreign protein. Through this method, native foreign protein can be isolated [Miller et al. (1989) Bio/Technology 7:698].

[0089] Alternatively, foreign proteins can also be secreted from the cell by creating chimeric DNA molecules that encode a fusion protein comprised of a signal peptide sequence fragment that provides for secretion of the foreign protein in bacteria [U.S. Pat. No. 4,336,336]. The signal sequence fragment usually encodes a signal peptide comprised of hydrophobic amino acids which direct the secretion of the protein from the cell. The protein is either secreted into the growth media (gram-positive bacteria) or into the periplasmic space, located between the inner and outer membrane of the cell (gram-negative bacteria). Preferably there are processing sites, which can be cleaved either in vivo or in vitro encoded between the signal peptide fragment and the foreign gene.

[0090] DNA encoding suitable signal sequences can be derived from genes for secreted bacterial proteins, such as the E. coli outer membrane protein gene (ompA) [Masui et al. (1983), in: Experimental Manipulation of Gene Expression; Ghrayeb et al. (1984) EMBO J. 3:2437] and the E. coli alkaline phosphatase signal sequence (phoA) [Oka et al. (1985) Proc. Natl. Acad. Sci. 82:7212). As an additional example, the signal sequence of the alpha-amylase gene from various Bacillus strains can be used to secrete heterologous proteins from B. subtilis [Palva et al. (1982) Proc. Natl. Acad. Sci. USA 79:5582; EP-A-0 244 042].

[0091] Usually, transcription termination sequences recognized by bacteria are regulatory regions located 3′ to the translation stop codon, and thus together with the promoter flank the coding sequence. These sequences direct the transcription of an mRNA which can be translated into the polypeptide encoded by the DNA. Transcription termination sequences frequently include DNA sequences of about 50 nucleotides capable of forming stem loop structures that aid in terminating transcription. Examples include transcription termination sequences derived from genes with strong promoters, such as the trp gene in E. coli as well as other biosynthetic genes.

[0092] Usually, the above described components, comprising a promoter, signal sequence (if desired), coding sequence of interest, and transcription termination sequence, are put together into expression constructs. Expression constructs are often maintained in a replicon, such as an extrachromosomal element (e.g. plasmids) capable of stable maintenance in a host, such as bacteria. The replicon will have a replication system, thus allowing it to be maintained in a prokaryotic host either for expression or for cloning and amplification. In addition, a replicon may be either a high or low copy number plasmid. A high copy number plasmid will generally have a copy number ranging from about 5 to about 200, and usually about 10 to about 150. A host containing a high copy number plasmid will preferably contain at least about 10, and more preferably at least about 20 plasmids. Either a high or low copy number vector may be selected, depending upon the effect of the vector and the foreign protein on the host.

[0093] Alternatively, the expression constructs can be integrated into the bacterial genome with an integrating vector. Integrating vectors usually contain at least one sequence homologous to the bacterial chromosome that allows the vector to integrate. Integrations appear to result from recombinations between homologous DNA in the vector and the bacterial chromosome. For example, integrating vectors constructed with DNA from various Bacillus strains integrate into the Bacillus chromosome (EP-A- 0 127 328). Integrating vectors may also be comprised of bacteriophage or transposon sequences.

[0094] Usually, extrachromosomal and integrating expression constructs may contain selectable markers to allow for the selection of bacterial strains that have been transformed. Selectable markers can be expressed in the bacterial host and may include genes which render bacteria resistant to drugs such as ampicillin, chloramphenicol, erythromycin, kanamycin (neomycin), and tetracycline [Davies et al. (1978) Annu. Rev. Microbiol. 32:469]. Selectable markers may also include biosynthetic genes, such as those in the histidine, tryptophan, and leucine biosynthetic pathways.

[0095] Alternatively, some of the above described components can be put together in transformation vectors. Transformation vectors are usually comprised of a selectable market that is either maintained in a replicon or developed into an integrating vector, as described above.

[0096] Expression and transformation vectors, either extra-chromosomal replicons or integrating vectors, have been developed for transformation into many bacteria. For example, expression vectors have been developed for, inter alia, the following bacteria: Bacillus subtilis [Palva et al. (1982) Proc. Natl. Acad. Sci. USA 79:5582; EP-A-0 036 259 and EP-A-0 063 953; WO 84/04541], Escherichia coli [Shimatake et al. (1981) Nature 292:128; Amann et al. (1985) Gene 40:183; Studier et al. (1986) J. Mol. Biol. 189:113; EP-A-0 036 776,EP-A-0 136 829 and EP-A-0 136 907], Streptococcus cremoris [Powell et al. (1988) Appl. Environ. Microbiol. 54:655]; Streptococcus lividans [Powell et al. (1988) Appl. Environ. Microbiol. 54:655], Streptomyces lividans [U.S. Pat. No. 4,745,056].

[0097] Methods of introducing exogenous DNA into bacterial hosts are well-known in the art, and usually include either the transformation of bacteria treated with CaCl₂ or other agents, such as divalent cations and DMSO. DNA can also be introduced into bacterial cells by electroporation. Transformation procedures usually vary with the bacterial species to be transformed. See e.g. [Masson et al. (1989) FEMS Microbiol. Lett. 60:273; Palva et al. (1982) Proc. Natl. Acad. Sci. USA 79:5582; EP-A-0 036 259 and EP-A-0 063 953; WO 84/04541, Bacillus], [Miller et al. (1988) Proc. Natl. Acad. Sci. 85:856; Wang et al. (1990) J. Bacteriol. 172:949, Campylobacter], [Cohen et al. (1973) Proc. Natl. Acad. Sci. 69:2110; Dower et al. (1988) Nucleic Acids Res. 16:6127;.Kushner (1978) “An improved method for transformation of Escherichia coli with ColE1-derived plasmids. In Genetic Engineering: Proceedings of the International Symposium on Genetic Engineering (eds. H. W. Boyer and S. Nicosia); Mandel et al. (1970) J. Mol. Biol. 53:159; Taketo (1988) Biochim. Biophys. Acta 949:318; Escherichia], [Chassy et al. (1987) FEMS Microbiol. Lett. 44:173 Lactobacillus]; [Fiedler et al. (1988) Anal. Biochem 170:38, Pseudomonas]; [Augustin et al. (1990) FEMS Microbiol. Lett. 66:203, Staphylococcus], [Barany et al. (1980) J. Bacteriol. 144:698; Harlander (1987) “Transformation of Streptococcus lactis by electroporation, in: Streptococcal Genetics (ed. J. Ferretti and R. Curtiss III); Perry et al. (1981) Infect. Immun. 32:1295; Powell et al. (1988) Appl. Environ. Microbiol. 54:655; Somkuti et al. (1987) Proc. 4th Evr. Cong. Biotechnology 1:412, Streptococcus].

[0098] v. Yeast Expression

[0099] Yeast expression systems are also known to one of ordinary skill in the art. A yeast promoter is any DNA sequence capable of binding yeast RNA polymerase and initiating the downstream (3′) transcription of a coding sequence (e.g. structural gene) into mRNA. A promoter will have a transcription initiation region which is usually placed proximal to the 5′ end of the coding sequence. This transcription initiation region usually includes an RNA polymerase binding site (the “TATA Box”) and a transcription initiation site. A yeast promoter may also have a second domain called an upstream activator sequence (UAS), which, if present, is usually distal to the structural gene. The UAS permits regulated (inducible) expression. Constitutive expression occurs in the absence of a UAS. Regulated expression may be either positive or negative, thereby either enhancing or reducing transcription.

[0100] Yeast is a fermenting organism with an active metabolic pathway, therefore sequences encoding enzymes in the metabolic pathway provide particularly useful promoter sequences. Examples include alcohol dehydrogenase (ADH) (EP-A-0 284 044), enolase, glucokinase, glucose-6-phosphate isomerase, glyceraldehyde-3-phosphate-dehydrogenase (GAP or GAPDH), hexokinase, phosphofructokinase, 3-phosphoglycerate mutase, and pyruvate kinase (PyK) (EPO-A-0 329 203). The yeast PHO5 gene, encoding acid phosphatase, also provides useful promoter sequences [Myanohara et al. (1983) Proc. Natl. Acad. Sci. USA 80:1].

[0101] In addition, synthetic promoters which do not occur in nature also function as yeast promoters. For example, UAS sequences of one yeast promoter may be joined with the transcription activation region of another yeast promoter, creating a synthetic hybrid promoter. Examples of such hybrid promoters include the ADH regulatory sequence linked to the GAP transcription activation region (U.S. Pat. Nos. 4,876,197 and 4,880,734). Other examples of hybrid promoters include promoters which consist of the regulatory sequences of either the ADH2, GAL4, GAL10, OR PHO5 genes, combined with the transcriptional activation region of a glycolytic enzyme gene such as GAP or PyK (BPA-0 164 556). Furthermore, a yeast promoter can include naturally occurring promoters of non-yeast origin that have the ability to bind yeast RNA polymerase and initiate transcription. Examples of such promoters include, inter alia, [Cohen et al. (1980) Proc. Natl. Acad. Sci. USA 77:1078; Henikoff et al. (1981) Nature 283:835; Hollenberg et al. (1981) Curr. Topics Microbiol. Immunol. 96:119; Hollenberg et al. (1979) “The Expression of Bacterial Antibiotic Resistance Genes in the Yeast Saccharomyces cerevisiae,” in: Plasmids of Medical, Environmental and Commercial Importance (eds. K. N. Timmis and A. Puhler); Mercerau-Puigalon et al. (1980) Gene 11:163; Panthier et al. (1980) Curr. Genet. 2:109;].

[0102] A DNA molecule may be expressed intracellularly in yeast, A promoter sequence may be directly linked with the DNA molecule, in which case the first amino acid at the N-terminus of the recombinant protein will always be a methionine, which is encoded by the ATG start codon. If desired, methionine at the N-terminus may be cleaved from the protein by in vitro incubation with cyanogen bromide.

[0103] Fusion proteins provide an alternative for yeast expression systems, as well as in mammalian, baculovirus, and bacterial expression systems. Usually, a DNA sequence encoding the N-terminal portion of an endogenous yeast protein, or other stable protein, is fused to the 5′ end of heterologous coding sequences. Upon expression, this construct will provide a fusion of the two amino acid sequences. For example, the yeast or human superoxide dismutase (SOD) gene, can be linked at the 5′ terminus of a foreign gene and expressed in yeast. The DNA sequence at the junction of the two amino acid sequences may or may not encode a cleavable site. See e.g. EP-A-0 196 056. Another example is a ubiquitin fusion protein. Such a fusion protein is made with the ubiquitin region that preferably retains a site for a processing enzyme (e.g. ubiquitin-specific processing protease) to cleave the ubiquitin from the foreign protein. Through this method, therefore, native foreign protein can be isolated (e.g. WO88/024066).

[0104] Alternatively, foreign proteins can also be secreted from the cell into the growth media by creating chimeric DNA molecules that encode a fusion protein comprised of a leader sequence fragment that provide for secretion in yeast of the foreign protein. Preferably, there are processing sites encoded between the leader fragment and the foreign gene that can be cleaved either in vivo or in vitro. The leader sequence fragment usually encodes a signal peptide comprised of hydrophobic amino acids which direct the secretion of the protein from the cell.

[0105] DNA encoding suitable signal sequences can be derived from genes for secreted yeast proteins, such as the genes for invertase (EP-A-0012873; JPO 62,096,086) and A-factor (U.S. Pat. No. 4,588,684). Alternatively, leaders of non-yeast origin exit, such as an interferon leader, that also provide for secretion in yeast (EP-A-0060057).

[0106] A preferred class of secretion leaders are those that employ a fragment of the yeast alpha-factor gene, which contains both a “pre” signal sequence, and a “pro” region. The types of alpha-factor fragments that can be employed include the full-length pre-pro alpha factor leader (about 83 amino acid residues) as well as truncated alpha-factor leaders (usually about 25 to about 50 amino acid residues) (U.S. Pat. Nos. 4,546,083 and 4,870,008; EP-A-0 324 274). Additional leaders employing an alpha-factor leader fragment that provides for secretion include hybrid alpha-factor leaders made with a presequence of a first yeast, but a pro-region from a second yeast alphafactor. (e.g. see WO 89/02463.)

[0107] Usually, transcription termination sequences recognized by yeast are regulatory regions located 3′ to the translation stop codon, and thus together with the promoter flank the coding sequence. These sequences direct the transcription of an mRNA which can be translated into the polypeptide encoded by the DNA. Examples of transcription terminator sequence and other yeast-recognized termination sequences, such as those coding for glycolytic enzymes.

[0108] Usually, the above described components, comprising a promoter, leader (if desired), coding sequence of interest, and transcription termination sequence, are put together into expression constructs. Expression constructs are often maintained in a replicon, such as an extrachromosomal element (e.g. plasmids) capable of stable maintenance in a host, such as yeast or bacteria. The replicon may have two replication systems, thus allowing it to be maintained, for example, in yeast for expression and in a prokaryotic host for cloning and amplification. Examples of such yeast-bacteria shuttle vectors include YEp24 (Botstein et al. (1979) Gene 8:17-24], pC1/1 [Brake et al. (1984) Proc. Natl. Acad. Sci USA 81:4642-4646], and YRp17 [Stinchcomb et al. (1982) J. Mol. Biol. 158:157]. In addition, a replicon may be either a high or low copy number plasmid. A high copy number plasmid will generally have a copy number ranging from about 5 to about 200, and usually about 10 to about 150. A host containing a high copy number plasmid will preferably have at least about 10, and more preferably at least about 20. Enter a high or low copy number vector may be selected, depending upon the effect of the vector and the foreign protein on the host. See e.g. Brake et al., supra.

[0109] Alternatively, the expression constructs can be integrated into the yeast genome with an integrating vector. Integrating vectors usually contain at least one sequence homologous to a yeast chromosome that allows the vector to integrate, and preferably contain two homologous sequences flanking the expression construct. Integrations appear to result from recombinations between homologous DNA in the vector and the yeast chromosome [Orr-Weaver et al. (1983) Methods in Enzymol. 101:228-245]. An integrating vector may be directed to a specific locus in yeast by selecting the appropriate homologous sequence for inclusion in the vector. See Orr-Weaver et al., supra. One or more expression construct may integrate, possibly affecting levels of recombinant protein produced [Rine et al. (1983) Proc. Natl. Acad. Sci. USA 80:6750]. The chromosomal sequences included in the vector can occur either as a single segment in the vector, which results in the integration of the entire vector, or two segments homologous to adjacent segments in the chromosome and flanking the expression construct in the vector, which can result in the stable integration of only the expression construct.

[0110] Usually, extrachromosomal and integrating expression constructs may contain selectable markers to allow for the selection of yeast strains that have been transformed. Selectable markers may include biosynthetic genes that can be expressed in the yeast host, such as ADE2, HIS4, LEU2, TRP1, and ALG7, and the G418 resistance gene, which confer resistance in yeast cells to tunicamycin and G418, respectively. In addition, a suitable selectable marker may also provide yeast with the ability to grow in the presence of toxic compounds, such as metal. For example, the presence of CUP1 allows yeast to grow in the presence of copper ions [Butt et al. (1987) Microbiol. Rev. 51:351].

[0111] Alternatively, some of the above described components can be put together into transformation vectors. Transformation vectors are usually comprised of a selectable marker that is either maintained in a replicon or developed into an integrating vector, as described above.

[0112] Expression and transformation vectors, either extrachromosomal replicons or integrating vectors, have been developed for transformation into many yeasts. For example, expression vectors have been developed for, inter alia, the following yeasts: Candida albicans [Kurtz, et al. (1986) Mol. Cell. Biol. 6:142], Candida maltosa [Kunze, et al. (1985) J. Basic Microbiol. 25:141]. Hansenula polymorpha [Gleeson, et al. (1986) J. Gen. Microbiol. 132:3459; Roggenkamp et al. (1986) Mol. Gen. Genet. 202:302], Kluyveromyces fragilis [Das, et al. (1984) J. Bacteriol. 158:1165], Kluyveromyces lactis [De Louvencourt et al. (1983) J. Bacteriol. 154:737; Van den Berg et al. (1990) Bio/Technology 8:135], Pichia guillerimondii [Kunze et al. (1985) J. Basic Microbiol. 25:141], Pichia pastoris [Cregg, et al. (1985) Mol. Cell. Biol. 5:3376; U.S. Pat. Nos. 4,837,148 and 4,929,555], Saccharomyces cerevisiae [Hinnen et al. (1978) Proc. Natl. Acad. Sci. USA 75:1929; Ito et al. (1983) J. Bacteriol. 153:163], Schizosaccharomyces pombe [Beach and Nurse (1981) Nature 300:706], and Yarrowia lipolytica [Davidow, et al. (1985) Curr. Genet. 10:380471 Gaillardin, et al. (1985) Curr. Genet. 10:49].

[0113] Methods of introducing exogenous DNA into yeast hosts are well-known in the art, and usually include either the transformation of spheroplasts or of intact yeast cells treated with alkali cations. Transformation procedures usually vary with the yeast species to be transformed, See e.g. [Kurtz et al. (1986) Mol. Cell. Biol. 6:142; Kunze et al. (1985) J. Basic Microbiol. 25:141; Candida]; [Gleeson et al. (1986) J. Gen. Microbiol. 132:3459; Roggenkamp et al. (1986) Mol. Gen. Genet. 202:302; Hansenula]; [Das et al. (1984) J. Bacteriol. 158:1165; De Louvencourt et al, (1983) J. Bacteriol. 154:1165; Van den Berg et al. (1990) Bio/Technology 8:135; Kluyveromyces]; [Cregg et al. (1985) Mol. Cell. Biol. 5:3376; Kunze et al. (1985) J. Basic Microbiol. 25:141; U.S. Pat. Nos. 4,837,148 & 4,929,555; Pichia]; [Hinnen et al. (1978) Proc. Natl. Acad. Sci. USA 75;1929; Ito et al. (1983) J. Bacteriol, 153:163 Saccharomyces]; [Beach & Nurse (1981) Nature 300:706; Schizosaccharomyces]; [Davidow et al. (1985) Curr. Genet. 10:39; Gaillardin et al. (1985) Curr. Gentet. 10:49; Yarrowia].

[0114] Pharmaceutical Compositions

[0115] Pharmaceutical compositions can comprise polypeptides and/or nucleic acid of the invention. The pharmaceutical compositions will comprise a therapeutically effective amount of either polypeptides, antibodies, or polynucleotides of the claimed invention.

[0116] The term “therapeutically effective amount” as used herein refers to an amount of a therapeutic agent to treat, ameliorate, or prevent a desired disease or condition, or to exhibit a detectable therapeutic or preventative effect. The effect can be detected by, for example, chemical markers or antigen levels. Therapeutic effects also include reduction in physical symptoms, such as decreased body temperature. The precise effective amount for a subject will depend upon the subject's size and health, the nature and extent of the condition, and the therapeutics or combination of therapeutics selected for administration. Thus, it is not useful to specify an exact effective amount in advance. However, the effective amount for a given situation can be determined by routine experimentation and is within the judgement of the clinician.

[0117] For purposes of the present invention, an effective dose will be from about 0.01 mg/ kg to 50 mg/kg or 0.05 mg/kg to about 10 mg/kg of the DNA constructs in the individual to which it is administered.

[0118] A pharmaceutical composition can also contain a pharmaceutically acceptable carrier. The term “pharmaceutically acceptable carrier” refers to a carrier for administration of a therapeutic agent, such as antibodies or a polypeptide, genes, and other therapeutic agents. The term refers to any pharmaceutical carrier that does not itself induce the production of antibodies harmful to the individual receiving the composition, and which may be administered without undue toxicity. Suitable carriers may be large, slowly metabolized macromolecules such as proteins, polysaccharides, polylactic acids, polyglycolic acids, polymeric amino acids, amino acid copolymers, and inactive virus particles. Such carriers are well known to those of ordinary skill in the art.

[0119] Pharmaceutically acceptable salts can be used therein, for example, mineral acid salts such as hydrochlorides, hydrobromides, phosphates, sulfates, and the like; and the salts of organic acids such as acetates, propionates, malonates, benzoates, and the like. A thorough discussion of pharmaceutically acceptable excipients is available in Remington's Pharmaceutical Sciences (Mack Pub. Co., N.J. 1991).

[0120] Pharmaceutically acceptable carriers in therapeutic compositions may contain liquids such as water, saline, glycerol and ethanol, Additionally, auxiliary substances, such as wetting or emulsifying agents, pH buffering substances, and the like, may be present in such vehicles. Typically, the therapeutic compositions are prepared as injectables, either as liquid solutions or suspensions; solid forms suitable for solution in, or suspension in, liquid vehicles prior to injection may also be prepared. Liposomes are included within the definition of a pharmaceutically acceptable carrier.

[0121] Delivery Methods

[0122] Once formulated, the compositions of the invention can be administered directly to the subject. The subjects to be treated can be animals; in particular, human subjects can be treated.

[0123] Direct delivery of the compositions will generally be accomplished by injection, either subcutaneously, intraperitoneally, intravenously or intramuscularly or delivered to the interstitial space of a tissue. The compositions can also be administered into a lesion. Other modes of administration include oral and pulmonary administration, suppositories, and transdermal or transcutaneous applications (e.g. see WO98/20734), needles, and gene guns or hyposprays. Dosage treatment may be a single dose schedule or a multiple dose schedule.

[0124] Vaccines

[0125] Vaccines according to the invention may either be prophylactic (i.e. to prevent infection) or therapeutic (i.e. to treat disease after infection).

[0126] Such vaccines comprise immunising antigen(s), immunogen(s), polypeptide(s), protein(s) or nucleic acid, usually in combination with “pharmaceutically acceptable carriers,” which include any carrier that does not itself induce the production of antibodies harmful to the individual receiving the composition. Suitable carriers are typically large, slowly metabolized macromolecules such as proteins, polysaccharides, polylactic acids, polyglycolic acids, polymeric amino acids, amino acid copolymers, lipid aggregates (such as oil droplets or liposomes), and inactive virus particles. Such carriers are well known to those of ordinary skill in the art. Additionally, these carriers may function as immunostimulating agents (“adjuvants”). Furthermore, the antigen or immunogen may be conjugated to a bacterial toxoid, such as a toxoid from diphtheria, tetanus, cholera, H. pylori, etc. pathogens.

[0127] Preferred adjuvants to enhance effectiveness of the composition include, but are not limited to: (1) aluminum salts (alum), such as aluminum hydroxide, aluminum phosphate, aluminum sulfate, etc; (2) oil-in-water emulsion formulations (with or without other specific immunostimulating agents such as muramyl peptides (see below) or bacterial cell wall components), such as for example (a) MF59™ (WO 90/14837; Chapter 10 in Vaccine design: the subunit and adjuvant approach, eds. Powell & Newman, Plenum Press 1995), containing 5% Squalene, 0.5% Tween 80, and 0.5% Span 85 (optionally containing various amounts of MTP-PE (see below), although not required) formulated into submicron particles using a microfluidizer such as Model 110Y microfluidizer (Microfluidics, Newton, Mass.), (b) SAF, containing 10% Squalane, 0.4% Tween 80, 5% pluronic-blocked polymer L121, and thr-MDP (see below) either microfluidized into a submicron emulsion or vortexed to generate a larger particle size emulsion, and (c) Ribi™ adjuvant system (RAS), (Ribi Immunochem, Hamilton, Mont.) containing 2% Squalene, 0.2% Tween 80, and one or more bacterial cell wall components from the group consisting of monophosphorylipid A (MPL), trehalose dimycolate (TDM), and cell wall skeleton (CWS), preferably MPL+CWS (Detox™); (3) saponin adjuvants, such as Stimulon™ (Cambridge Bioscience, Worcester, Mass.) may be used or particles generated therefrom such as ISCOMs (immunostimulating complexes); (4) Complete Freund's Adjuvant (CFA) and Incomplete Freund's Adjuvant (IFA); (5) cytokines, such as interleukins (e.g. IL-1, IL-2, IL-4, IL-5, IL-6, IL-7, IL-12, etc.), interferons (e.g. gamma interferon), macrophage colony stimulating factor (M-CSP), tumor necrosis factor (TNP), etc; and (6) other substances that act as immunostimulating agents to enhance the effectiveness of the composition. Alum and MF59™ are preferred.

[0128] As mentioned above, muramyl peptides include, but are not limited to, N-acetyl-muramyl-L-threonyl-D-isoglutamine (thr-MDP), N-acetyl-normuramyl-L-alanyl-D-isoglutamine (nor-MDP), N-acetylmuramyl-L-alanyl-D-isoglutaminyl-L-alanine-2-(1′-2′-dipalmitoyl-sn-glycero-3-hydroxyphosphoryloxy)-ethylamine (MTP-PE), etc.

[0129] The immunogenic compositions (e.g. the immunising antigen/immunogen/polypeptide/protein/ nucleic acid, pharmaceutically acceptable carrier, and adjuvant) typically will contain diluents, such as water, saline, glycerol, ethanol, etc. Additionally, auxiliary substances, such as wetting or emulsifying agents, pH buffering substances, and the like, may be present in such vehicles.

[0130] Typically, the immunogenic compositions are prepared as injectables, either as liquid solutions or suspensions; solid forms suitable for solution in, or suspension in, liquid vehicles prior to injection may also be prepared. The preparation also may be emulsified or encapsulated in liposomes for enhanced adjuvant effect, as discussed above under pharmaceutically acceptable carriers.

[0131] Immunogenic compositions used as vaccines comprise an immunologically effective amount of the antigenic or immunogenic polypeptides, as well as any other of the above-mentioned components, as needed. By “immunologically effective amount”, it is meant that the administration of that amount to an individual, either in a single dose or as part of a series, is effective for treatment or prevention. This amount varies depending upon the health and physical condition of the individual to be treated, the taxonomic group of individual to be treated (e.g. nonhuman primate, primate, etc.), the capacity of the individual's immune system to synthesize antibodies, the degree of protection desired, the formulation of the vaccine, the treating doctor's assessment of the medical situation, and other relevant factors. It is expected that the amount will fall in a relatively broad range that can be determined through routine trials.

[0132] The immunogenic compositions are conventionally administered parenterally, e.g. by injection, either subcutaneously, intramuscularly, or transdermally/transcutaneously (e.g. WO98/20734). Additional formulations suitable for other modes of administration include oral and pulmonary formulations, suppositories, and transdermal applications. Dosage treatment may be a single dose schedule or a multiple dose schedule. The vaccine may be administered in conjunction with other immunoregulatory agents.

[0133] As an alternative to protein-based vaccines, DNA vaccination may be employed [e.g. Robinson & Torres (1997) Seminars in Immunology 9:271-283; Donnelly et al. (1997) Annu Rev Immunol 15:617-648; see later herein].

[0134] Gene Delivery Vehicles

[0135] Gene therapy vehicles for delivery of constructs including a coding sequence of a therapeutic of the invention, to be delivered to the mammal for expression in the mammal, can be administered either locally or systemically. These constructs can utilize viral or non-viral vector approaches in in vivo or ex vivo modality. Expression of such coding sequence can be induced using endogenous mammalian or heterologous promoters. Expression of the coding sequence in vivo can be either constitutive or regulated.

[0136] The invention includes gene delivery vehicles capable of expressing the contemplated nucleic acid sequences. The gene delivery vehicle is preferably a viral vector and, more preferably, a retroviral, adenoviral, adeno-associated viral (AAV), herpes viral, or alphavirus vector. The viral vector can also be an astrovirus, coronavirus, orthomyxovirus, papovavirus, paramyxovirus, parvovirus, picornavirus, poxvirus, or togavirus viral vector. See generally, Jolly (1994) Cancer Gene Therapy 1:51-64; Kimura (1994) Human Gene Therapy 5:845-852; Connelly (1995) Human Gene Therapy 6:185-193; and Kaplitt (1994) Nature Genetics 6:148-153.

[0137] Retroviral vectors are well known in the art and we contemplate that any retroviral gene therapy vector is employable in the invention, including B, C and D type retroviruses, xenotropic retroviruses (for example, NZB-X1, NZB-X2 and NZB9-1 (see O'Neill (1985) J. Virol. 53:160) polytropic retroviruses e.g. MCF and MCF-MLV (see Kelly (1983) J. Virol. 45:291), spumaviruses and lentiviruses. See RNA Tumor Viruses, Second Edition, Cold Spring Harbor Laboratory, 1985.

[0138] Portions of the retroviral gene therapy vector may be derived from different retroviruses, For example, retrovector LTRs may be derived from a Murine Sarcoma Virus, a tRNA binding site from a Rous Sarcoma Virus, a packaging signal from a Murine Leukemia Virus, and an origin of second strand synthesis from an Avian Leukosis Virus.

[0139] These recombinant retroviral vectors may be used to generate transduction competent retroviral vector particles by introducing them into appropriate packaging cell lines (see U.S. Pat. No. 5,591,624). Retrovirus vectors can be constructed for site-specific integration into host cell DNA by incorporation of a chimeric integrase enzyme into the retroviral particle (see WO96/37626). It is preferable that the recombinant viral vector is a replication defective recombinant virus.

[0140] Packaging cell lines suitable for use with the above-described retrovirus vectors are well known in the art, are readily prepared (see WO95/30763 and WO92/05266), and can be used to create producer cell lines (also termed vector cell lines or “VCLs”) for the production of recombinant vector particles. Preferably, the packaging cell lines are made from human parent cells (e.g. HT1080 cells) or mink parent cell lines, which eliminates inactivation in human serum.

[0141] Preferred retroviruses for the construction of retroviral gene therapy vectors include Avian Leukosis Virus, Bovine Leukemia, Virus, Murine Leukemia Virus, Mink-Cell Focus-Inducing Virus, Murine Sarcoma Virus, Reticuloendotheliosis Virus and Rous Sarcoma Virus. Particularly preferred Murine Leukemia Viruses include 4070A and 1504A (Hartley and Rowe (1976) J Virol 19:19-25), Abelson (ATCC No. VR-999), Friend (ATCC No. VR-245), Graffi, Gross (ATCC Nol VR-590), Kirsten, Harvey Sarcoma Virus and Rauscher (ATCC No. VR-998) and Moloney Murine Leukemia Virus (ATCC No. VR-190). Such retroviruses may be obtained from depositories or collections such as the American Type Culture Collection (“ATCC”) in Rockville, Md. or isolated from known sources using commonly available techniques.

[0142] Exemplary known retroviral gene therapy vectors employable in this invention include those described in patent applications GB2200651, EP0415731, EP0345242, EP0334301, WO89/02468; WO89/05349, WO89/09271, WO90/02806, WO90/07936, WO94/03622, WO93/25698, WO93/25234, WO93/11230, WO93/10218, WO91/02805, WO91/02825, WO95/07994, U.S. Pat. No. 5,219,740, U.S. Pat. No. 4,405,712, U.S. Pat. No. 4,861,719, U.S. Pat. No. 4,980,289, U.S. Pat. No. 4,777,127, U.S. Pat. No. 5,591,624. See also Vile (1993) Cancer Res 53:3860-3864; Vile (1993) Cancer Res 53:962-967; Ram (1993) Cancer Res 53 (1993) 83-88; Takamiya (1992) J Neurosci Res 33:493-503; Baba (1993) J Neurosurg 79:729-735; Mann (1983) Cell 33:153; Cane (1984) Proc Natl Acad Sci 81:6349; and Miller (1990) Human Gene Therapy 1.

[0143] Human adenoviral gene therapy vectors are also known in the art and employable in this invention. See, for example, Berkner (1988) Biotechniques 6:616 and Rosenfeld (1991) Science 252:431, and WO93/07283, WO93/06223, and WO93/07282. Exemplary known adenoviral gene therapy vectors employable in this invention include those described in the above referenced documents and in WO94/12649, WO93/03769, WO93/19191, WO94/28938, WO95/11984, WO95/00655, WO95/27071, WO95/29993, WO95/34671, WO96/05320, WO94/08026, WO94/11506, WO93/06223, WO94/24299, WO95/14102, WO95/24297, WO95/02697, WO94/28152, WO94/24299, WO95/09241, WO95/25807, WO95/05835, WO94/18922 and WO95/09654. Alternatively, administration of DNA linked to killed adenovirus as described in Curiel (1992) Hum. Gene Ther. 3:147-154 may be employed. The gene delivery vehicles of the invention also include adenovirus associated virus (AAV) vectors. Leading and preferred examples of such vectors for use in this invention are the AAV-2 based vectors disclosed in Srivastava, WO93/09239. Most preferred AAV vectors comprise the two AAV inverted terminal repeats in which the native D-sequences are modified by substitution of nucleotides, such that at least 5 native nucleotides and up to 18 native nucleotides, preferably at least 10 native nucleotides up to 18 native nucleotides, most preferably 10 native nucleotides are retained and the remaining nucleotides of the D-sequence are deleted or replaced with non-native nucleotides. The native D-sequences of the AAV inverted terminal repeats are sequences of 20 consecutive nucleotides in each AAV inverted terminal repeat (i.e. there is one sequence at each end) which are not involved in HP formation. The non-native replacement nucleotide may be any nucleotide other than the nucleotide found in the native D-sequence in the same position. Other employable exemplary AAV vectors are pWP-19, pWN-1, both of which are disclosed in Nahreini (1993) Gene 124:257-262. Another example of such an AAV vector is psub201 (see Samulski (1987) J. Virol. 61:3096). Another exemplary AAV vector is the Double-D ITR vector. Construction of the Double-D ITR vector is disclosed in U.S. Pat. No. 5,478,745. Still other vectors are those disclosed in Carter U.S. Pat. No. 4,797,368 and Muzyczka U.S. Pat. No. 5,139,941, Chartejee U.S. Pat. No. 5,474,935, and Kotin WO94/288157. Yet a further example of an AAV vector employable in this invention is SSV9AFABTKneo, which contains the AFP enhancer and albumin promoter and directs expression predominantly in the liver. Its structure and construction are disclosed in Su (1996) Human Gene Therapy 7:463-470. Additional AAV gene therapy vectors are described in U.S. Pat. No. 5,354,678, U.S. Pat. No. 5,173,414, U.S. Pat. No. 5,139,941, and U.S. Pat. No. 5,252,479.

[0144] The gene therapy vectors of the invention also include herpes vectors. Leading and preferred examples are herpes simplex virus vectors containing a sequence encoding a thymidine kinase polypeptide such as those disclosed in U.S. Pat. No. 5,288,641 and EP0176170 (Roizman). Additional exemplary herpes simplex virus vectors include HFEM/ICP6-LacZ disclosed in WO95/04139 (Wistar), pHSVlac described in Geller (1988) Science 241:1667-1669 and in WO90/09441 & WO92/07945, HSV Us3::pgC-lacZ described in Fink (1992) Human Gene Therapy 3:11-19 and HSV 7134, 2 RH 105 and GAL4 described in EP 0453242 (Breakefield), and those deposited with ATCC as accession numbers ATCC VR-977 and ATCC VR-260.

[0145] Also contemplated are alpha virus gene therapy vectors that can be employed in this invention. Preferred alpha virus vectors are Sindbis viruses vectors. Togaviruses, Semliki Forest virus (ATCC VR-67; ATCC VR-1247), Middleberg virus (ATCC VR-370), Ross River virus (ATCC VR-373; ATCC VR-1246), Venezuelan equine encephalitis virus (ATCC VR923; ATCC VR-1250; ATCC VR-1249; ATCC VR-532), and those described in U.S. Pat. Nos. 5,091,309, 5,217,879, and WO92/10578. More particularly, those alpha virus vectors described in U.S. Ser. No. 08/405,627, filed Mar. 15, 1995,WO94/21792, WO92/10578, WO95/07994, U.S. Pat. No. 5,091,309 and U.S. Pat. No. 5,217,879 arc employable. Such alpha viruses may be obtained from depositories or collections such as the ATCC in Rockville, Md. or isolated from known sources using commonly available techniques. Preferably, alphavirus vectors with reduced cytotoxicity are used (see U.S. Ser. No. 08/679640).

[0146] DNA vector systems such as eukaryotic layered expression systems are also useful for expressing the nucleic acids of the invention. See WO95/07994 for a detailed description of eukaryotic layered expression systems. Preferably, the eukaryotic layered expression systems of the invention are derived from alphavirus vectors and most preferably from Sindbis viral vectors.

[0147] Other viral vectors suitable for use in the present invention include those derived from poliovirus, for example ATCC VR-58 and those described in Evans, Nature 339 (1989) 385 and Sabin (1973) J. Biol. Standardization 1:115; rhinovirus, for example ATCC VR-1110 and those described in Arnold (1990) J Cell Biochent L401;,pox viruses such as canary pox virus or vaccinia virus, for example ATCC VR-111 and ATCC VR-2010 and those described in Fisher-Hoch (1989) Proc Natl Acad Sci 86:317; Flexner (1989) Ann NY Acad Sci 569:86, Flexner (1990) Vaccine 8:17; in U.S. Pat. No. 4,603,112 and U.S. Pat. No. 4,769,330 and WO89/01973; SV40 virus, for example ATCC VR-305 and those described in Mulligan (1979) Nature 277:108 and Madzak (1992) J Gen Virol 73:1533; influenza virus, for example ATCC VR-797 and recombinant influenza viruses made employing reverse genetics techniques as described in U.S. Pat. No. 5,166,057 and in Enami (1990) Proc Natl Acad Sci 87:3802-3805; Enami & Palese (1991) J Virol 65:2711-2713 and Luytjes (1989) Cell 59:110, (see also McMichael (1983) NEJ Med 309:13, and Yap (1978) Nature 273:238 and Nature (1979) 277:108); human immunodeficiency virus as described in EP-0386882 and in Buchschacher (1992) J. Virol. 66:2731; measles virus, for example ATCC VR-67 and VR-1247 and those described in EP-0440219; Aura virus, for example ATCC VR-368; Bebaru virus, for example ATCC VR-600 and ATCC VR-1240; Cabassou virus, for example ATCC VR-922; Chikungunya virus, for example ATCC VR-64 and ATCC VR-1241; Fort Morgan Virus, for example ATCC VR-924; Getah virus, for example ATCC VR-369 and ATCC VR-1243, Kyzylagach virus, for example ATCC VR-927; Mayaro virus, for example ATCC VR-66; Mucambo virus, for example ATCC VR-580 and ATCC VR-1244; Ndumu virus, for example ATCC VR-371; Pixuna virus, for example ATCC VR-372 and ATCC VR-1245; Tonate virus, for example ATCC VR-925; Triniti virus, for example ATCC VR-469, Una virus, for example ATCC VR-374; Whataroa virus, for example ATCC VR-926; Y-62-33 virus, for example ATCC VR-375; O'Nyong virus, Eastern encephalitis virus, for example ATCC VR-65 and ATCC VR-1242; Western encephalitis virus, for example ATCC VR-70, ATCC VR-1251, ATCC VR-622 and ATCC VR-1252; and coronavirus, for example ATCC VR-740 and those described in Hamre (1966) Proc Soc Exp Biol Med 121:190.

[0148] Delivery of the compositions of this invention into cells is not limited to the above mentioned viral vectors. Other delivery methods and media may be employed such as, for example, nucleic acid expression vectors, polycationic condensed DNA linked or unlinked to killed adenovirus alone, for example see U.S. Ser. No. 08/366,787, filed Dec. 30, 1994 and Curiel (1992) Hum Gene Ther 3:147-154 ligand linked DNA, for example see Wu (1989) J Biol Chem 264:16985-16987, eucaryotic cell delivery vehicles cells, for example see U.S. Ser. No.08/240,030, filed May 9, 1994, and U.S. Ser. No. 08/404,796, deposition of photopolymerized hydrogel materials, hand-held gene transfer particle gun, as described in U.S. Pat. No. 5,149,655, ionizing radiation as described in U.S. Pat. No. 5,206,152 and in WO92/11033, nucleic charge neutralization or fusion with cell membranes. Additional approaches are described in Philip (1994) Mol Cell Biol 14:2411-2418 and in Woffendin (1994) Proc Natl Acad Sci 91:1581-1585.

[0149] Particle mediated gene transfer may be employed, for example see U.S. Ser. No. 60/023,867. Briefly, the sequence can be inserted into conventional vectors that contain conventional control sequences for high level expression, and then incubated with synthetic gene transfer molecules such as polymeric DNA-binding cations like polylysine, protamine, and albumin, linked to cell targeting ligands such as asialoorosomucoid, as described in Wu & Wu (1987) J. Biol. Chem. 262:4429-4432, insulin as described in Hucked (1990) Biochem Pharmacol 40:253-263, galactose as described in Plank (1992) Bioconjugate Chem 3:533-539, lactose or transferrin.

[0150] Naked DNA may also be employed. Exemplary naked DNA introduction methods are described in WO90/11092 and U.S. Pat. No. 5,580,859. Uptake efficiency may be improved using biodegradable latex beads. DNA coated latex beads are efficiently transported into cells after endocytosis initiation by the beads. The method may be improved further by treatment of the beads to increase hydrophobicity and thereby facilitate disruption of the endosome and release of the DNA into the cytoplasm.

[0151] Liposomes that can act as gene delivery vehicles are described in U.S. Pat. No. 5,422,120, WO95/13796, WO94/23697, WO91/14445 and EP-524,968. As described in U.S. Ser. No. 60/023,867, on non-viral delivery, the nucleic acid sequences encoding a polypeptide can be inserted into conventional vectors that contain conventional control sequences for high level expression, and then he incubated with synthetic gene transfer molecules such as polymeric DNA-binding cations like polylysine, protamine, and albumin, linked to cell targeting ligands such as asialoorosomucoid, insulin, galactose, lactose, or transferrin. Other delivery systems include the use of liposomes to encapsulate DNA comprising the gene under the control of a variety of tissue-specific or ubiquitously-active promoters. Further non-viral delivery suitable for use includes mechanical delivery systems such as the approach described in Woffendin et al (1994) Proc. Natl. Acad. Sci. USA 91(24):11581-11585. Moreover, the coding sequence and the product of expression of such can be delivered through deposition of photopolymerized hydrogel materials. Other conventional methods for gene delivery that can be used for delivery of the coding sequence include, for example, use of hand-held gene transfer particle gun, as described in U.S. Pat. No. 5,149,655; use of ionizing radiation for activating transferred gene, as described in U.S. Pat. No. 5,206,152 and WO92/11033

[0152] Exemplary liposome and polycationic gene delivery vehicles are those described in U.S. Pat. No. 5,422,120 and 4,762,915; in WO 95/13796; WO94/23697; and WO91/14445; in EP-0524968; and in Stryer, Biochemistry, pages 236-240 (1975) W. H. Freeman, San Francisco; Szoka (1980) Biochem Biophys Acta 600:1; Bayer (1979) Biochem Biophys Acta 550:464; Rivnay (1987) Meth Enzymol 149:119; Wang (1987) Proc Natl Acad Sci 84:7851; Plant (1989) Anal Biochem 176:420.

[0153] A polynucleotide composition can comprises therapeutically effective amount of a gene therapy vehicle, as the term is defined above. For purposes of the present invention, an effective dose will be from about 0.01 mg/kg to 50 mg/kg or 0.05 mg/kg to about 10 mg/kg of the DNA constructs in the individual to which it is administered.

[0154] Delivery Methods

[0155] Once formulated, the polynucleotide compositions of the invention can be administered (I) directly to the subject; (2) delivered ex vivo, to cells derived from the subject; or (3) in vitro for recombinant protein expression. The subjects to be treated can be mammals or birds. Also, human subjects can be treated.

[0156] Direct delivery of the compositions will generally be accomplished by injection, either subcutaneously, intraperitoneally, intravenously or intramuscularly or delivered to the interstitial space of a tissue. The compositions can also be administered into a lesion. Other modes of administration include oral and pulmonary administration, suppositories, and transdermal or transcutaneous applications (e.g. see WO98/20734), needles, and gene guns or hyposprays. Dosage treatment may be a single dose schedule or a multiple dose schedule.

[0157] Methods for the ex vivo delivery and reimplantation of transformed cells into a subject are known in the art and described in e.g. WO93/14778. Examples of cells useful in ex vivo applications include, for example, stem cells, particularly hematopoetic, lymph cells, macrophages, dendritic cells, or tumor cells.

[0158] Generally, delivery of nucleic acids for both ex vivo and in vitro applications can be accomplished by the following procedures, for example, dextran-mediated transfection, calcium phosphate precipitation, polybrene mediated transfection, protoplast fusion, electroporation, encapsulation of the polynucleotide(s) in liposomes, and direct microinjection of the DNA into nuclei, all well known in the art.

[0159] Polynucleotide and Polypeptide Pharmaceutical Compositions

[0160] In addition to the pharmaceutically acceptable carriers and salts described above, the following additional agents can be used with polynucleotide and/or polypeptide compositions.

[0161] A. Polypeptides

[0162] One example are polypeptides which include, without limitation: asioloorosomucoid (ASOR); transferrin; asialoglycoproteins; antibodies; antibody fragments; ferritin; interleukins; interferons, granulocyte, macrophage colony stimulating factor (GM-CSF), granulocyte colony stimulating factor (G-CSF), macrophage colony stimulating factor (M-CSF), stem cell factor and erythropoietin. Viral antigens, such as envelope proteins, can also be used. Also, proteins from other invasive organisms, such as the 17 amino acid peptide from the circumsporozoite protein of plasmodium falciparum known as RII.

[0163] B. Hormones, Vitamins, etc.

[0164] Other groups that can be included are, for example: hormones, steroids, androgens, estrogens, thyroid hormone, or vitamins, folic acid.

[0165] C. Polyalkylenes, Polysaccharides, etc.

[0166] Also, polyalkylene glycol can be included with the desired polynucleotides/polypeptides. In a preferred embodiment, the polyalkylene glycol is polyethlylene glycol. In addition, mono-, di-, or polysaccharides can be included. In a preferred embodiment of this aspect, the polysaccharide is dextran or DEAE-dextran. Also, chitosan and poly(lactide-co-glycolide)

[0167] D. Lipids, and Liposomes

[0168] The desired polynucleotide/polypeptide can also be encapsulated in lipids or packaged in liposomes prior to delivery to the subject or to cells derived therefrom.

[0169] Lipid encapsulation is generally accomplished using liposomes which are able to stably bind or entrap and retain nucleic acid. The ratio of condensed polynucleotide to lipid preparation can vary but will generally be around 1:1 (mg DNA:micromoles lipid), or more of lipid. For a review of the use of liposomes as carriers for delivery of nucleic acids, see, Hug and Sleight (1991) Biochim. Biophys. Acta. 1097:1-17; Straubinger (1983) Meth. Enzymol. 101:512-527.

[0170] Liposomal preparations for use in the present invention include cationic (positively charged), anionic (negatively charged) and neutral preparations. Cationic liposomes have been shown to mediate intracellular delivery of plasmid DNA (Feigner (1987) Proc. Natl. Acad. Sci. USA 84:7413-7416); mRNA (Malone (1989) Proc. Natl. Acad. Sci. USA 86:6077-6081); and purified transcription factors (Debs (1990) J. Biol. Chem. 265:10189-10192), in functional form.

[0171] Cationic liposomes are readily available. For example, N[1,2,3-dioleyloxy)propyl]-N,N,N-triethylammonium (DOTMA) liposomes are available under the trademark Lipofectin, from GIBCO BRL, Grand Island, N.Y. (See, also, Feigner supra). Other commercially available liposomes include transfectace (DDAB/DOPE) and DOTAP/DOPE (Boerhinger). Other cationic liposomes can be prepared from readily available materials using techniques well known in the art. See, e.g. Szoka (1978) Proc. Natl. Acad. Sci, USA 75:4194-4198; WO90/11092 for a description of the synthesis of DOTAP (1,2-bis(oleoyloxy)-3-(trimethylammonio)propane) liposomes.

[0172] Similarly, anionic and neutral liposomes are readily available, such as from Avanti Polar Lipids (Birmingham, Ala.), or can be easily prepared using readily available materials. Such materials include phosphatidyl choline, cholesterol, phosphatidyl ethanolamine, dioleoylphosphatidyl choline (DOPC), dioleoylphosphatidyl glycerol (DOPG), dioleoylphoshatidyl ethanolamine (DOPE), among others. These materials can also be mixed with the DOTMA and DOTAP starting materials in appropriate ratios, Methods for making liposomes using these materials are well known in the art.

[0173] The liposomes can comprise multilammelar vesicles (MLVs), small unilamellar vesicles (SUVs), or large unilamellar vesicles (LUVs). The various liposome-nucleic acid complexes are prepared using methods known in the art. See e.g. Straubinger (1983) Meth. Immuol. 101:512-527; Szoka (1978) Proc. Natl. Acad. Sci. USA 75:4194-4198; Papahadjopoulos (1975) Biochim. Biophys. Acta 394:483; Wilson (1979) Cell 17:77); Deamer & Bangham (1976) Biochim. Biophys. Acta 443:629; Ostro (1977) Biochem. Biophys. Res. Commun. 76:836; Fraley (1979) Proc. Natl. Acad. Sci. USA 76:3348); Enoch & Strittmatter (1979) Proc. Natl. Acad. Sci. USA 76:145;Fraley (1980) J. Biol. Chem. (1980) 255:10431; Szoka & Papahadjopoulos (1978) Proc. Natl. Acad. Sci. USA 75:145; and Schaefer-Ridder (1982) Science 215:166.

[0174] E. Lipoproteins

[0175] In addition, lipoproteins can be included with the polynucleotide/polypeptide to be delivered. Examples of lipoproteins to be utilized include: chylomicrons, HDL, IDL, LDL, and VLDL. Mutants, fragments, or fusions of these proteins can also be used. Also, modifications of naturally occurring lipoproteins can be used, such as acetylated LDL. These lipoproteins can target the delivery of polynucleotides to cells expressing lipoprotein receptors. Preferably, if lipoproteins are including with the polynucleotide to be delivered, no other targeting ligand is included in the composition.

[0176] Naturally occurring lipoproteins comprise a lipid and a protein portion. The protein portion are known as apoproteins. At the present, apoproteins A, B, C, D, and E have been isolated and identified. At least two of these contain several proteins, designated by Roman numerals, AI, AII, AIV; CI, CII, CIII.

[0177] A lipoprotein can comprise more than one apoprotein, For example, naturally occurring chylomicrons comprises of A, B, C, & E, over time these lipoproteins lose A and acquire C and E apoproteins. VLDL comprises A, B, C, & E apoproteins, LDL comprises apoprotein B; HDL comprises apoproteins A, C, & E.

[0178] The amino acid of these apoproteins are known and are described in, for example, Breslow (1985) Annu Rev. Biochem 54:699; Law (1986) Adv. Exp Med. Biol, 151:162; Chen (1986) J Biol Chem 261:12918; Kane (1980) Proc Natl Acad Sci USA 77:2465; and Utermann (1984) Hum Genet 65:232.

[0179] Lipoproteins contain a variety of lipids including, triglycerides, cholesterol (free and esters), and phospholipids. The composition of the lipids varies in naturally occurring lipoproteins. For example, chylomicrons comprise mainly triglycerides. A more detailed description of the lipid content of naturally occurring lipoproteins can be found, for example, in Meth. Enzymol. 128 (1986). The composition of the lipids are chosen to aid in conformation of the apoprotein for receptor binding activity. The composition of lipids can also be chosen to facilitate hydrophobic interaction and association with the polynucleotide binding molecule.

[0180] Naturally occurring lipoproteins can be isolated from serum by ultracentrifugation, for instance. Such methods are described in Meth. Enzymol. (supra); Pitas (1980) J. Biochem. 255:5454-5460 and Mahey (1979) J Clin. Invest 64:743-750. Lipoproteins can also be produced by in vitro or recombinant methods by expression of the apoprotein genes in a desired host cell. See, for example, Atkinson (1986) Annu Rev Biophys Chem 15:403 and Radding (1958) Biochim Biophys Acta 30: 443. Lipoproteins can also be purchased from commercial suppliers, such as Biomedical Techniologies, Inc., Stoughton, Mass., USA. Further description of lipoproteins can be found in Zuckermann et al. PCT/US97/14465.

[0181] F. Polycationic Agents

[0182] Polycationic agents can be included, with or without lipoprotein, in a composition with the desired polynucleotide/polypeptide to be delivered.

[0183] Polycationic agents, typically, exhibit a net positive charge at physiological relevant pH and are capable of neutralizing the electrical charge of nucleic acids to facilitate delivery to a desired location. These agents have both in vitro, ex vivo, and in vivo applications. Polycationic agents can be used to deliver nucleic acids to a living subject either intramuscularly, subcutaneously, etc.

[0184] The following are examples of useful polypeptides as polycationic agents: polylysine, polyarginine, polyornithine, and protamine. Other examples include histones, protamines, human serum albumin, DNA binding proteins, non-histone chromosomal proteins, coat proteins from DNA viruses, such as (X174, transcriptional factors also contain domains that bind DNA and therefore may be useful as nucleic aid condensing agents. Briefly, transcriptional factors such as C/CEBP, c-jun, c-fos, AP-1, AP-2, AP-3, CPP, Prot-1, Sp-1, Oct-1, Oct-2, CREP, and TFIID contain basic domains that bind DNA sequences.

[0185] Organic polycationic agents include: spermine, spermidine, and purtrescine.

[0186] The dimensions and of the physical properties of a polycationic agent can be extrapolated from the list above, to construct other polypeptide polycationic agents or to produce synthetic polycationic agents.

[0187] Synthetic polycationic agents which are useful include, for example, DEAE-dextran, polybrene, Lipofectin™, and lipofectAMINE™ are monomers that form polycationic complexes when combined with polynocleotides/polypeptides.

[0188] Nucleic Acid Hybridisation

[0189] “Hybridization” refers to the association of two nucleic acid sequences to one another by hydrogen bonding, Typically, one sequence will be fixed to a solid support and the other will be free in solution. Then, the two sequences will be placed in contact with one another under conditions that favor hydrogen bonding. Factors that affect this bonding include: the type and volume of solvent; reaction temperature; time of hybridization; agitation; agents to block the non-specific attachment of the liquid phase sequence to the solid support (Denhardt's reagent or BLOTTO); concentration of the sequences; use of compounds to increase the rate of association of sequences (dextran sulfate or polyethylene glycol); and the stringency of the washing conditions following hybridization. See Sambrook et al. [supra] vol.2, chapt.9, pp.9.47 to 9.57.

[0190] “Stringency” refers to conditions in a hybridization reaction that favor association of very similar sequences over sequences that differ. For example, the combination of temperature and salt concentration should be chosen that is approximately 120 to 200° C. below the calculated Tm of the hybrid under study. The temperature and salt conditions can often be determined empirically in preliminary experiments in which samples of genomic DNA immobilized on filters are hybridized to the sequence of interest and then washed under conditions of different stringencies. See Sambrook et al. at page 9.50.

[0191] Variables to consider when performing, for example, a Southern blot are (1) the complexity of the DNA being blotted and (2) the homology between the probe and the sequences being detected. The total amount of the fragment(s) to be studied can vary a magnitude of 10, from 0.1 to 1 μg for a plasmid or phage digest to 10⁻⁹ to 10⁻⁸ g for a single copy gene in a highly complex eukaryotic genome. For lower complexity polynucleotides, substantially shorter blotting, hybridization, and exposure times, a smaller amount of starting polynucleotides, and lower specific activity of probes can be used. For example, a single-copy yeast gene can be detected with an exposure time of only 1 hour starting with 1 μg of yeast DNA, blotting for two hours, and hybridizing for 4-8 hours with a probe of 10⁸ cpm/μg. For a single-copy mammalian gene a conservative approach would start with 10 μg of DNA, blot overnight, and hybridize overnight in the presence of 10% dextran sulfate using a probe of greater than 10⁸ cpm/μg, resulting in an exposure time of ˜24 hours.

[0192] Several factors can affect the melting temperature (Tm) of a DNA-DNA hybrid between the probe and the fragment of interest, and consequently, the appropriate conditions for hybridization and washing. In many cases the probe is not 100% homologous to the fragment. Other commonly encountered variables include the length and total G+C content of the hybridizing sequences and the ionic strength and formamide content of the hybridization buffer. The effects of all of these factors can be approximated by a single equation:

Tm=81+16.6(log₁₀Ci)+0.4[%(G+C)]−0.6(% formamide)−600/n −1.5 (% mismatch).

[0193] where Ci is the salt concentration (monovalent ions) and n is the length of the hybrid in base pairs (slightly modified from Meinkoth & Wahl (1984) Anal. Biochem. 138: 267-284).

[0194] In designing a hybridization experiment, some factors affecting nucleic acid hybridization can be conveniently altered. The temperature of the hybridization and washes and the salt concentration during the washes are the simplest to adjust. As the temperature of the hybridization increases (i.e. stringency), it becomes less likely for hybridization to occur between strands that are nonhomologous, and as a result, background decreases. If the radiolabeled probe is not completely homologous with the immobilized fragment (as is frequently the case in gene family and interspecies hybridization experiments), the hybridization temperature must be reduced, and background will increase. The temperature of the washes affects the intensity of the hybridizing band and the degree of background in a similar manner. The stringency of the washes is also increased with decreasing salt concentrations.

[0195] In general, convenient hybridization temperatures in the presence of 50% formamide are 42° C. for a probe with is 95% to 100% homologous to the target fragment, 37° C. for 90% to 95% homology, and 32° C. for 85% to 90% homology. For lower homologies, formamide content should be lowered and temperature adjusted accordingly, using the equation above. If the homology between the probe and the target fragment are not known, the simplest approach is to start with both hybridization and wash conditions which are nonstringent. If non-specific bands or high background are observed after autoradiography, the filter can be washed at high stringency and reexposed. If the time required for exposure makes this approach impractical, several hybridization and/or washing stringencies should be tested in parallel.

[0196] Nucleic Acid Probe Assays

[0197] Methods such as PCR, branched DNA probe assays, or blotting techniques utilizing nucleic acid probes according to the invention can determine the presence of cDNA or mRNA. A probe is said to “hybridize” with a sequence of the invention if it can form a duplex or double stranded complex, which is stable enough to be detected.

[0198] The nucleic acid probes will hybridize to the Chlamydial nucleotide sequences of the invention (including both sense and antisense strands). Though many different nucleotide sequences will encode the amino acid sequence, the native Chlamydial sequence is preferred because it is the actual sequence present in cells. mRNA represents a coding sequence and so a probe should be complementary to the coding sequence; single-stranded cDNA is complementary to mRNA, and so a cDNA probe should be complementary to the non-coding sequence.

[0199] The probe sequence need not be identical to the Chlamydial sequence (or its complement)—some variation in the sequence and length can lead to increased assay sensitivity if the nucleic acid probe can form a duplex with target nucleotides, which can be detected. Also, the nucleic acid probe can include additional nucleotides to stabilize the formed duplex. Additional Chlamydial sequence may also be helpful as a label to detect the formed duplex. For example, a non-complementary nucleotide sequence may be attached to the 5′ end of the probe, with the remainder of the probe sequence being complementary to a Chlamydial sequence. Alternatively, non-complementary bases or longer sequences can be interspersed into the probe, provided that the probe sequence has sufficient complementarity with the a Chlamydial sequence in order to hybridize therewith and thereby form a duplex which can be detected.

[0200] The exact length and sequence of the probe will depend on the hybridization conditions, such as temperature, salt condition and the like. For example, for diagnostic applications, depending on the complexity of the analyte sequence, the nucleic acid probe typically contains at least 10-20 nucleotides, preferably 15-25, and more preferably ≧30 nucleotides, although it may be shorter than this. Short primers generally require cooler temperatures to form sufficiently stable hybrid complexes with the template.

[0201] Probes may be produced by synthetic procedures, such as the triester method of Matteucci et al. [J. Am. Chem. Soc. (1981) 103:3185], or according to Urdea et al. [Proc. Natl. Acad. Sci. USA (1983) 80: 7461], or using commercially available automated oligonucleotide synthesizers.

[0202] The chemical nature of the probe can be selected according to preference. For certain applications, DNA or RNA are appropriate. For other applications, modifications may be incorporated e.g. backbone modifications, such as phosphorothioates or methylphosphonates, can be used to increase in viva half-life, alter RNA affinity, increase nuclease resistance etc. [e.g. see Agrawal & Iyer (1995) Curr Opin Biotechnol 6:12-19; Agrawal (1996) TIBTECH 14:376-387]; analogues such as peptide nucleic acids may also be used (e.g. see Corey (1997) TIBTECH 15:224-229; Buchardt et al. (1993) TIBTECH 11:384-386].

[0203] Alternatively, the polymerase chain reaction (PCR) is another well-known means for detecting small amounts of target nucleic acids. The assay is described in: Mullis et al. [Meth. Enzymzol. (1987) 155: 335-350]; U.S. Pat. Nos. 4,683,195 & 4,683,202. Two ‘primers’ hybridize with the target nucleic acids and are used to prime the reaction. The primers can comprise sequence that does not hybridize to the sequence of the amplification target (or its complement) to aid with duplex stability or, for example, to incorporate a convenient restriction site. Typically, such sequence will flank the desired Chlamydial sequence.

[0204] A thermostable polymerase creates copies of target nucleic acids from the primers using the original target nucleic acids as a template. After a threshold amount of target nucleic acids are generated by the polymerase, they can be detected by more traditional methods, such as Southern blots. When using the Southern blot method, the labelled probe will hybridize to the Chlamydial sequence (or its complement).

[0205] Also, mRNA or cDNA can be detected by traditional blotting techniques described in Sambrook et al [supra]. mRNA, or cDNA generated from mRNA using a polymerase enzyme, can be purified and separated using gel electrophoresis. The nucleic acids on the gel are then blotted onto a solid support, such as nitrocellulose. The solid support is exposed to a labelled probe and then washed to remove any unhybridized probe. Next, the duplexes containing the labeled probe are detected. Typically, the probe is labelled with a radioactive moiety.

### BRIEF DESCRIPTION OF THE DRAWINGS

[0206] FIGS. 1-189 show data pertaining to examples 1-189.

[0207] FIG. 190 shows a representative 2D gel of proteins in elementary bodies.

[0208] FIG. 191 shows an alignment of sequences in five (six) proteins of the invention.

### EXAMPLES

[0209] The examples indicate C. pneumoniae proteins, together with evidence to support the view that the proteins are useful antigens for vaccine production and development or for diagnostic purposes. This evidence takes the form of:

[0210] Computer prediction based on sequence information from CWL029 strain (e.g. using the PSORT algorithm available from www.psort.nibb.ac.jp).

[0211] Data on recombinant expression and purification of the proteins cloned from IOL207 strain.

[0212] Western blots to demonstrate immunoreactivity in serum (typically a blot of an EB extract of C. pneumoniae strain FB/96 stained with mouse antiserum against the recombinant protein).

[0213] FACS analysis of C. pneumoniae bacteria or purified EBs to confirm accessibility of the antigen to the immune system (see also table III).

[0214] An indication if the protein was identified by MALDI-TOF from a 2D gel electrophoresis map of proteins from purified elementary bodies from strain FB/96. This confirms that the protein is expressed in vivo (see also table V).

[0215] Various tests can be used to assess the in vivo immunogenicity of the proteins identified in the examples. For example, the proteins can be expressed recombinantly and used to screen patient sera by immunoblot. A positive reaction between the protein and patient serum indicates that the patient has previously mounted an immune response to the protein in question i.e. the protein is an immunogen. This method can also be used to identify immunodominant proteins.

[0216] The recombinant protein can also be conveniently used to prepare antibodies e.g. in a mouse. These can be used for direct confirmation that a protein is located on the cell-surface. Labelled antibody (e.g. fluorescent labelling for FACS) can be incubated with intact bacteria and the presence of label on the bacterial surface confirms the location of the protein.

[0217] In particular, the following methods (A) to (O) were used to express, purify and biochemically characterise the proteins of the invention:

### Cloning of CPN ORFs for Expression in E. coli

[0218] ORFs of Chlamydia pneumoniae (Cpn) were cloned in such a way as to potentially obtain three different kind of proteins:

[0219] a) proteins having an hexa-histidine tag at the C-terminus (cpn-His)

[0220] b) proteins having a GST fusion partner at the N-terminus (Gst-cpn)

[0221] c) proteins having both hexa-histidine tag at the C-terminus and GST at the N-terminus (GST/His fusion; NH₂-GST-cpn-(His)₆-COOH)

[0222] The type a) proteins were obtained upon cloning in the pET21b+ (Novagen). The type b) and c) proteins were obtained upon cloning in modified pGEX-KG vectors [Guan & Dixon (1991) Anal. Biochem. 192:262]. For instance pGEX-KG was modified to obtain pGEX-NN, then by modifying pGEX-NN to obtain pGEX-NNH. The Gst-cpn and Gst-cpn-His proteins were obtained in pGEX-NN and pGEX-NNH respectively.

[0223] The modified versions of pGEX-KG vector were made with the aim of allowing the cloning of single amplification products in all three vectors after only one double restriction enzyme digestion and to minimise the presence of extraneous amino acids in the final recombinant proteins.

[0224] (A) Construction of pGEX-NN and pGEX-NNH Expression Vectors

[0225] Two couples of complementary oligodeoxyribonucleotides were synthesised using the DNA synthesiser ABI394 (Perkin Elmer) and the reagents from Cruachem (Glasgow, Scotland). Equimolar amounts of the oligo pairs (50 ng each oligo) were annealed in T4 DNA ligase buffer (New England Biolabs) for 10 min in a final volume of 50 μl and then were left to cool slowly at room temperature. With the described procedure he following DNA linkers were obtained:

```
gexNN linker:
NdeI NheI XmaI EcoRI NcoI SalI XhoI SacI NotI
GATCCCATATGGCTAGCCCGGGGAATTCGTCCATGGAGTGAGTCGACTGACTCGAGTGATCGAGCTCCTGAGCGGCCGCATGAA
        GGTATACCGATCGGGCCCCTTAAGCAGGTACCTCACTCAGCTGACTGAGCTCACTAGCTCGAGGACTCGCCGGCGTACTTTCGA
gexNNH linker:
                      HindIII NotI XhoI --Hexa-Histidine--
            TCGACAAGCTTGCGGCCGCACTCGAGCATCACCATCACCATCACTGAT
                GTTCGAACGCCGGCGTGAGCACGTAGAGGTAGTGGTAGTGACTATCGA
```

[0226] The plasmid pGEX-KG was digested with BamHI and HindIII and 100 ng were ligated overnight at 16° C. to the linker gexNN with a molar ratio of 3:1 linker/plasmid using 200 units of T4 DNA ligase (New england Biolabs). After transformation of the ligation product in E. coli DH5, a clone containing the pGEX-NN plasmid, having the correct linker, was selected by means of restriction enzyme analysis and DNA sequencing.

[0227] The new plasmid pGEX-NN was digested with SalI and HindIII and ligated to the linker gex-NNH. After transformation of the ligation product in E. coli DH5, a clone containing the pGEX-NNH plasmid, having the correct linker, was selected by means of restriction enzyme analysis and DNA sequencing.

[0228] (B) Chromosomal DNA Preparation

[0229] The chromosomal DNA of elementary bodies (EB) of C. pneumoniae strain IOL-207 was prepared by adding 1.5 ml of lysis buffer (10 mM Tris-HCl, 150 mM NaCl, 2 mM EDTA, 0,6 % SDS, 100 μg/ml Proteinase K, pH 8) to 450 μl EB suspension (400.000/μl) and incubating overnight at 37° C. After sequential extraction with phenol, phenol-chloroform, and chloroform, the DNA was precipitated with 0.3 M sodium acetate, pH 5.2 and 2 volumes of absolute ethanol. The DNA pellet was washed with 70 % ethanol. After solubilization with distilled water and treatment with 20 μg/ml RNAse A for 1 hour at RT, the DNA was extracted again with phenol-chloroform, alcohol precipitated and suspended with 300 μl 1 mM Tris-HCl pH 8.5. The DNA concentration was evaluated by measuring OD₂₆₀ of the sample.

[0230] (C) Oligonucleotide Design

[0231] Synthetic oligonucleotide primers were designed on the basis of the coding sequence of each ORF using the sequence of C. pneumoniae strain CWL029. Any predicted signal peptide were omitted, by deducing the 5′ end amplification primer sequence immediately downstream from the predicted leader sequence. For most ORFs, the 5′ tail of the primers (table I) included only one restriction enzyme recognition site (NdeI, or NheI, or SpeI depending on the gene's own restriction pattern); the 3′ primer tails (tablet) included a XhoI or a NotI or a HindIII restriction site.

TABLE I

Oligonucleotide tails of the primers
used to amplify Cpn genes.

| | |
|---|---|
| 5′ tails | 3′ tails |

| | | | |
|---|---|---|---|
| NdeI | 5′ GTGCGTCATATG 3′ | XhoI | 5′ GCGTCTCGAG 3′ |
| NheI | 5′ GTGCGTGCTAGC 3′ | NotI | 5′ ACTCGCTAGCGGCCGC |

| | | |
|---|---|---|
| SpeI | 5′ GTGCGTACTAGT 3′ | 3′ |

| | |
|---|---|
| Hind III | 5′ GCGTAAGCTT 3′ |

[0232] As well as containing the restriction enzyme recognition sequences, the primers included nucleotides which hybridized to the sequence to be amplified. The number of hybridizing nucleotides depended on the melting temperature of the primers which was determined as described [(Breslauer et al. (1986) PNAS USA 83:3746-50]. The average melting temperature of the selected oligos was 50-55° C. for the hybridizing region alone and 65-75° C. for the whole oligos. Table II shows the forward and reverse primers used for each amplification.

[0233] (D) Amplification

[0234] The standard PCR protocol was as follow: 50 ng genomic DNA were used as template in the presence of 0.2 μM each primer, 200 μM each dNTP, 1.5 mM MgCl₂, 1× PCR buffer minus Mg (Gibco-BRL), and 2 units of Taq DNA polymerase (Platinum Taq, Gibco-BRL) in a final volume of 100 μl. Each sample underwent a double-step amplification: the first 5 cycles were performed using as the hybridizing temperature the one of the oligos excluding the restriction enzyme tail, followed by 25 cycles performed according to the hybridization temperature of the whole lenght primers. The standard cycles were as follow:

| denaturation: 94° C., 2 min | | |
|---|---|---|
| denaturation: 94° C., 30 seconds | | |
| | {close oversize brace} | 5 cycles |
| hybridization: 51° C., 50 seconds | | |
| elongation: 72° C., 1 min or 2 min and 40 sec | | |
| denaturation: 94° C., 30 seconds | | |
| | {close oversize brace} | 25 cycles |
| hybridization: 70° C., 50 seconds | | |

elongation: 72° C., 1 min or 2 min and 40 sec
72° C., 7 min
4° C.

[0235] The elongation time was 1 min for ORFs shorter than 2000 bp, and 2 min and 40 seconds for ORFs longer than 2000 bp. The amplifications were performed using a Gene Amp PCR system 9600 (Perkin Elmer).

[0236] To check the amplification results, 4 μl of each PCR product was loaded onto 1-1.5 agarose gel and the size of amplified fragments compared with DNA molecular weight standards (DNA markers III or IX, Roche). The PCR products were loaded on agarose gel and after electrophoresis the right size bands were excised from the gel. The DNA was purified from the agarose using the Gel Extraction Kit (Qiagen) following the instruction of the manufacturer. The final elution volume of the DNA was 50 μl TE (10 mM Tris-HCl, 1 mM EDTA, pH 8). One μl of each purified DNA was loaded onto agarose gel to evaluate the yield.

[0237] (E) Digestion of PCR Fragments

[0238] One-two μg of purified PCR product were double digested overnight at 37° C. with the appropriate restriction enzymes (60 units of each enzyme) using the appropriate restriction buffer in 100 μl final volume. The restriction enzymes and the digestion buffers were from New England Biolabs. After purification of the digested DNA (PCR purification Kit, Qiagen) and elution with 30 μl TE, 1 μl was subjected to agarose gel electrophoresis to evaluate the yield in comparison to titrated molecular weight standards (DNA markers III or IX, Roche).

[0239] (F) Digestion of the Cloning Vectors (pET21b+, pGEX-NN, and pGEX-NNH)

[0240] 10 μg of plasmid was double digested with 100 units of each restriction enzyme in 400 μl reaction volume in the presence of appropriate buffer by overnight incubation at 37° C. After electrophoresis on a 1% agarose gel, the band corresponding to the digested vector was purified from the gel using the Qiagen Qiaex II Gel Extraction Kit and the DNA was eluted with 50 μl TE. The DNA concentration was evaluated by measuring OD₂₆₀ of the sample.

[0241] (G) Cloning

[0242] 75 ng of the appropriately digested and purified vectors and the digested and purified fragments corresponding to each ORF, were ligated in final volumes of 1.0-20 μl with a molar ratio of 1:1 fragment/vector, using 400 units T4 DNA ligase (New England Biolabs) in the presence of the buffer supplied by the manufacturer. The reactions were incubated overnight at 16° C.

[0243] Transformation in E. coli DH5 competent cells was performed as follow: the ligation reaction was mixed with 200 μl of competent DH5 cells and incubated on ice for 30 min and then at 42° C. for 90 seconds. After cooling on ice, 0.8 ml LB was added and the cells were incubated for 45 min at 37° C. under shaking. 100 and 900 μl of cell suspensions were plated on separate plates of agar LB 100 μg/ml Ampicillin and the plates were incubated overnight at 37° C. The screening of the transformants was done by growing randomly chosen clones in 6 ml LB 100 μg/ml Ampicillin, by extracting the DNA using the Qiagen Qiaprep Spin Miniprep Kit following the manufacturer instructions, and by digesting 2 μl of plasmid minipreparation with the restriction enzymes specific for the restriction cloning sites. After agarose gel electrophoresis of the digested plasmid mini-preparations, positive clones were chosen on the basis of the correct size of the restriction fragments, as evaluated by comparison with appropriate molecular weight markers (DNA markers III or IX, Roche).

[0244] (H) Expression

[0245] 1 μl of each right plasmid mini-preparation was transformed in 200 μl of competent E. coli strain suitable for expression of the recombinant protein. All pET21b+ recombinant plasmids were transformed in BL21 DE3 (Novagen) E. coli cells, whilst all pGEX-NN and all pGEX-NNH recombinant plasmids were transformed in BL21 cells (Novagen). After plating transformation mixtures on LB/Amp agar plates and incubation overnight at 37° C., single colonies were inoculated in 3 ml LB 100 μg/ml Ampicillin and grown at 37° C. overnight. 70 μl of the overnight culture was inoculated in 2 ml LB/Amp and grown at 37° C. until OD₆₀₀ of the pET clones reached the 0.4-0.8 value or until OD₆₀₀ of the pGEX clones reached the 0.8-1 value. Protein expression was then induced by adding IPTG (Isopropil β-D thio-galacto-piranoside) to the mini-cultures. pET clones were induced using 1 mM IPTG, whilst pGEX clones were induced using 0.2 mM IPTG. After 3 hours incubation at 37° C. the final OD₆₀₀ was checked and the cultures were cooled on ice. After centrifugation of 0.5 ml culture, the cell pellet was suspended in 50 μl of protein Loading Sample Buffer (60 mM TRIS-HCl pH 6.8, 5% w/v SDS, 10% v/v glycerin, 0.1% w/v Bromophenol Blue, 100 mM DTT) and incubated at 100° C. for 5 min. A volume of boiled sample corresponding to 0.1 OD₆₀₀ culture was analysed by SDS-PAGE and Coomassie Blue staining to verify the presence of induced protein band.

### Purification of the Recombinant Proteins

[0246] Single colonies were inoculated in 25 ml LB 100 μg/ml Ampicillin and grown at 37° C. overnight. The overnight culture was inoculated in 500 ml LB/Amp and grown under shaking at 25° C. until OD₆₀₀ 0.4-0.8 value for the pET clones, or until OD₆₀₀ 0.8-1 value for the pGEX clones. Protein expression was then induced by adding IPTG to the cultures. pET clones were induced using 1 mM IPTG, whilst pGEX clones were induced using 0.2 mM IPTG. After 4 hours incubation at 25° C. the final OD₆₀₀ was checked and the cultures were cooled on ice. After centrifugation at 6000 rpm (JA10 rotor, Beckman), the cell pellet was processed for purification or frozen at −20° C.

[0247] (I) Procedure for the Purification of Soluble His-tagged Proteins from E. coli

[0248] 1. Transfer the pellets from −20° C. to ice bath and reconstitute with 10 ml 50 mM NaHPO₄ buffer, 300 mM NaCl, pH 8.0, pass in 40-50 ml centrifugation tubes and break the cells as per the following outline:

[0249] 2. Break the pellets in the French Press performing three passages with in-line washing.

[0250] 3. Centrifuge at about 30-40000×g per 15-20 min. If possible use rotor JA 25.50 (21000 rpm, 15 min.) or JA-20 (18000 rpm, 15 min.)

[0251] 4. Equilibrate the Poly-Prep columns with 1 ml Fast Flow Chelating Sepharose resin with 50 mM phosphate buffer, 300 mM NaCl, pH 8.0.

[0252] 5. Store the centrifugation pellet at −20° C., and load the supernatant in the columns.

[0253] 6. Collect the flow through.

[0254] 7. Wash the columns with 10 ml (2 ml+2 ml+4 ml) 50 mM phosphate buffer, 300 mM NaCl, pH 8.0.

[0255] 8. Wash again with 10 ml 20 mM imidazole buffer, 50 mM phosphate, 300 mM NaCl, pH 8.0.

[0256] 9. Elute the proteins bound to the columns with 4.5 ml (1.5 ml+1.5 ml+1.5 ml) 250 mM imidazole buffer, 50 mM phosphate, 300 mM NaCl, pH 8.0 and collect the 3 corresponding fractions of ˜1.5 ml each. Add to each tube 15 μl DTT 200 mM (final concentration 2 mM)

[0257] 10. Measure the protein concentration of the first two fractions with the Bradford method, collect a 10 μg aliquot of proteins from each sample and analyse by SDS-PAGE. (N.B.: should the sample be too diluted, load 21 μl+7 μl loading buffer).

[0258] 11. Store the collected fractions at +4° C. while waiting for the results of the SDS-PAGE analysis.

[0259] 12. For immunisation prepare 4-5 aliquots of 100 μg each in 0.5 ml in 40% glycerol. The dilution buffer is the above elution buffer, plus 2 mM DTT. Store the aliquots at −20° C. until immunisation.

[0260] (J) Purification of His-tagged Proteins from Inclusion Bodies

[0261] Purifications were carried out essentially according the following protocol:

[0262] 1. Bacteria are collected from 500 ml cultures by centrifugation. If required store bacterial pellets at −20° C. For extraction, resuspend each bacterial pellet in 10 ml 50 mM TRIS-HCl buffer, pH 8.5 on an ice bath.

[0263] 2. Disrupt the resuspended bacteria with a French Press, performing two passages.

[0264] 3. Centrifuge at 35000×g for 15 min and collect the pellets. Use a Beckman rotor JA 25.50 (21000 rpm, 15 min.) or JA-20 (18000 rpm, 15 min.).

[0265] 4. Dissolve the centrifugation pellets with 50 mM TRIS-HCl, 1 mM TCEP {Tris(2-carboxyethyl)phosphine hydrochloride, Pierce), 6M guanidium chloride, pH 8.5. Stir for ˜10 min. with a magnetic bar.

[0266] 5. Centrifuge as described above, and collect the supernatant.

[0267] 6. Prepare an adequate number of Poly-Prep (Bio-Rad) columns containing 1 ml of Fast Flow Chelating Sepharose (Pharmacia) saturated with Nichel according to manufacturer recommendations. Wash the columns twice with 5 ml of H₂O and equilibrate with 50 mM TRIS-HCl, 1 mM TCEP, 6M guanidinium chloride, pH 8.5.

[0268] 7. Load the supernatants from step 5 onto the columns, and wash with 5 ml of 50 mM TRIS-Hcl buffer, 1 mM TCEP, 6M urea, pH 8.5

[0269] 8. Wash the columns with 10 ml of 20 mM imidazole, 50 mM TRIS-HCl, 6M urea, 1 mM TCEP, pH 8.5. Collect and set aside the first 5 ml for possible further controls.

[0270] 9. Elute the proteins bound to the columns with 4.5 ml of a buffer containing 250 mM imidazole, 50 mM TRIS-HCl, 6M urea, 1 mM TCEP, pH 8.5. Add the elution buffer in three 1.5 ml aliquots, and collect the corresponding 3 fractions. Add to each fraction 15 μl DTT (final concentration 2 mM).

[0271] 10. Measure eluted protein concentration with the Bradford method, and analyze aliquots of ca 10 μg of protein by SDS-PAGE.

[0272] 11. Store proteins at −20° C. in 40% (v/v) glycerol, 50 mM TRIS-HCl, 2M urea, 0.5 M arginine, 2 mM DTT, 0.3 mM TCEP, 83.3 mM imidazole, pH 8.5

[0273] (K) Procedure for the Purification of GST-fusion Proteins from E. coli

[0274] 1. Transfer the bacterial pellets from −20° C. to an ice bath and resuspend with 7.5 ml PBS, pH 7.4 to which a mixture of protease inhibitors (CØMPLETE™—Boehringer Mannheim, 1 tablet every 25 ml of buffer) has been added. Transfer to 40-50 ml centrifugation tubes and sonicate according to the following procedure:

[0275] a) Position the probe at about 0.5 cm from the bottom of the tube

[0276] b) Block the tube with the clamp

[0277] c) Dip the tube in an ice bath

[0278] d) Set the sonicator as follows: Timer→Hold, Duty Cycle→55, Out. Control→6.

[0279] e) perform 5 cycles of 10 impulses at a time lapse of 1 minute (i.e. one cycle=10 impulses+˜45″ hold; b. 10 impulses+˜45″ hold; c. 10 impulses+˜45″ hold; d. 10 impulses+˜45″ hold; e. 10 impulses+˜45″ hold)

[0280] 2. Centrifuge at about 30-40000×g for 15-20 min. E.g.: use rotor Beckman JA 25.50 at 21000 rpm, for 15 min.

[0281] 3. Store the centrifugation pellets at −20° C., and load the supernatants on the chromatography columns, as follows

[0282] 4. Equilibrate the Poly-Prep (Bio-Rad) columns with 0.5 ml (≅1 ml suspension) of Glutathione-Sepharose 4B resin, wash with 2 ml (1+1) H₂O, and then with 10 ml (2+4+4) PBS, pH 7.4.

[0283] 5. Load the supernatants on the columns and discard the flow through.

[0284] 6. Wash the columns with 10 ml (2+4+4) PBS, pH 7.4.

[0285] 7. Elute the proteins bound to the columns with 4.5 ml of 50 mM TRIS buffer, 10 mM reduced glutathione, pH 8.0, adding 1.5 ml+1.5 ml+1.5 ml and collecting the respective 3 fractions of ˜1.5 ml each.

[0286] 8. Measure the protein concentration of the first two fractions with the Bradford method, analyse a 10 μg aliquot of proteins from each sample by SDS-PAGE. (N.B.: if the sample is too diluted load 21 μl (+7 μl loading buffer).

[0287] 9. Store the collected fractions at +4° C. while waiting for the results of the SDS-PAGE analysis.

[0288] 10. For each protein destined to the immunisation prepare 4-5 aliquots of 100 μg each in 0.5 ml of 40% glycerol. The dilution buffer is 50 mM TRIS.HCl, 2 mM DTT, pH 8.0. Store the aliquots at −20° C. until immunisation.

### Serology

[0289] (L) Protocol of Immunization

[0290] 1. Groups of four CDI female mice aged between 6 and 7 weeks were immunized with 20 μg of recombinant protein resuspended in 100 μl.

[0291] 2. Four mice for each group received 3 doses with a 14 days interval schedule.

[0292] 3. Immunization was performed through intra-peritoneal injection of the protein with an equal volume of Complete Freund's Adjuvant (CFA) for the first dose and Incomplete Freund's Adjuvant (IFA) for the following two doses.

[0293] 4. Sera were collected before each immunization. Mice were sacrified 14 days after the third immunization and the collected sera were pooled and stored at −20° C.

[0294] (M) Western Blot Analysis of Cpn Elementary Body Proteins with Mouse Sera

[0295] Aliquots of elementary bodies containing approximately 4 μg of proteins, mixed with SDS loading buffer (1×: 60 mM TRIS-HCl pH 6.8, 5% w/v SDS, 10% v/v glycerin, 0.1% Bromophenol Blue, 100 mM DTT) and boiled 5 minutes at 95° C., were loaded on a 12% SDS-PAGE gel. The gel was run using a SDS-PAGE running buffer containing 250 mM TRIS, 2.5 mM Glycine and 0.1% SDS. The gel was electroblotted onto nitrocellulose membrane at 200 mA for 30 minutes. The membrane was blocked for 30 minutes with PBS, 3% skimmed milk powder and incubated O/N at 4° C. with the appropriate dilution (1/100) of the sera. After washing twice with PBS+0.1% Tween (Sigma) the membrane was incubated for 2 hours with peroxidase-conjugated secondary anti-mouse antibody (Sigma) diluted 1:3000. The nitrocellulose was washed twice for 10 minutes with PBS+0.1% Tween-20 and once with PBS and thereafter developed by Opti-4CN Substrate Kit (Biorad).

[0296] Lanes shown in Western blots are: (P)=pre-immune control serum; (I)=immune serum.

[0297] (N) FACS Analysis of Chlamydia pneumoniae Elementary Bodies with Mouse Sera

[0298] 1. 2×10⁵ Elementary Bodies (EB)/well were washed with 200 μl of PBS-0.1% BSA in a 96 wells U bottom plate and centrifuged for 10 min. at 1200 rpm, at 4° C.

[0299] 2. The supernatant was discarded and the E.B. resuspended in 10 μl of PBS-0.01% BSA.

[0300] 3. 10 μl mouse sera diluted in PBS-0.1% BSA were added to the E.B. suspention to a final dilution of 1:400, and incubated on ice for 30 min.

[0301] 4. EB were washed by adding 180 μl PBS-0.1% BSA and centrifuged for 10min. at 1200 rpm, 4° C.

[0302] 5. The supernatant was discarded and the E.B. resuspended in 101 of PBS-0.1% BSA.

[0303] 6. 10 μl of a goat anti-mouse IgG, F(ab′)₂ fragment specific-R-Phycoerythrin-conjugated (Jackson Immunoresearch Laboratories Inc., cat.N°115-116-072) was added to the EB suspension to a final dilution of 1:100, and incubated on ice for 30 min. in the dark.

[0304] 7. EB were washed by adding 180 μl PBS-0.1% BSA and centrifuged for 10 min. at 1200 rpm, 4° C.

[0305] 8. The supernatant was discarded and the E.B. resuspended in 150 μl of PBS-0.1% BSA.

[0306] 9. E.B. suspension was passed through a cytometric chamber of a FACS Calibur (Becton Dikinson, Mountain View, Calif. USA) and 10.000 events were acquired.

[0307] 10. Data were analysed using Cell Quest Software (Becton Dikinson, Mountain View, Calif. USA) by drawing a morphological dot plot (using forward and side scatter parameters) on E.B. signals. An histogram plot was then created on FL2 intensity of fluorescence log scale recalling the morphological region of EB.

[0308] NB: the results of FACS depend not only on the extent of accessibility of the native antigens but also on the quality of the antibodies elicited by the recombinant antigens, which may have structures with a variable degree of correct folding as compared with the native protein structures. Therefore, even if a FACS assay appears negative this does not necessarily mean that the protein is not abundant or accessible on the surface. PorB antigen, for instance, gave negative results in FACS but is a surface-exposed neutralising antigen [Kubo & Stephens (2000) Mol. Microbiol. 38:772-780].

[0309] (O) Mass Spectrometry Analysis of Two-dimensional Electrophoretic Protein Maps

[0310] Gradient purified EBs from strain FB/96 were solubilized at a final concentration of 5.5 mg/ml with immobiline rehydratation buffer (7M urea, 2M thiourea, 2% (w/v) CHAPS, 2% (w/v) ASB 14 [Chevallet et al. (1998) Electrophor. 19:1901-9], 2% (v/v) C.A 3-10NL (Amersham Pharmacia Biotech), 2 mM tributyl phosphine, 65 mM DTT). Samples (250 μg protein) were adsorbed overnight on Immobiline DryStrips (7 cm, pH 3-10 non linear). Electrophocusing was performed in a IPGphor Isoelectric Focusing Unit (Amersham Pharmacia Biotech). Before PAGE separation, the focused strips were incubated in 4M urea, 2M thiourea, 30% (v/v) glycerol, 2% (w/v) SDS, 5 mM tributyl phosphine 2.5%(w/v) acrylamide, 50 mM Tris-HCl pH 8.8, as described [Herbert et al. (1998) Electrophor. 19:845-51]. SDS-PAGE was performed on linear 9-16% acrylamide gradients. Gels were stained with colloidal Coomassie (Novex, San Diego) [Doherty et al. (1998) Electrophor. 19:355-63]. Stained gels were scanned with a Personal Densitometer SI (Molecular Dynamics) at 8 bits and 50 μm per pixel. Map images were annotated with the software Image Master 2D Elite, version 3.10 (Amersham Pharmacia Biotech). Protein spots were excised from the gel, using an Ettan Spot picker (Amersham Pharmacia Biotech), and dried in a vacuum centrifuge. In-gel digestion of samples for mass spectrometry and extraction of peptides were performed as described by Wilm et al. [Nature (1996) 379:466-9]. Samples were desalted with a ZIP TIP (Millipore), eluted with a saturated solution of alpha-cyano-4-hydroxycinnamic acid in 50% acetonitrile, 0.1% TFA and directly loaded onto a SCOUT 381 multiprobe plate (Bruker). Spectra were acquired on a Bruker Biflex II MALDI-TOF. Spectra were calibrated using a combination of known standard peptides, located in spots adjacent to the samples. Resulting values for monoisotopic peaks were used for database searches using the computer program Mascot (www.matrixscience.com). All searches were performed using an error of 200-500 ppm as constraint. A representative gel is shown in FIG. 190.

### Example 1

[0311] The following C. pneumoniae protein (PID 4376552) was expressed <SEQ ID 1; cp6552>:

| | |
|---|---|
| 1 | MKKKLSLLVG LIFVLSSCHK EDAQNKIRIV ASPTPHAELL ESLQEEAKDL |
| 51 | GIKLKILPVD DYRIPNRLLL DKQVDANYFQ HQAFLDDECE RYDCKGELVV |
| 101 | IAKVHLEPQA IYSKKHSSLE RLKSQKKLTI AIPVDRTNAQ RALHLLEECG |
| 151 | LIVCKGPANL NMTAKDVCGK ENRSINILEV SAPLLVGSLP DVDAAVIPGN |
| 201 | FAIAANLSPK KDSLCLEDLS VSKYTNLVVI RSEDVGSPKM IKLQKLFQSP |
| 251 | SVQHFFDTKY HGNILTMTQD NG* |

[0312] A predicted signal peptide is highlighted.

[0313] The cp6552 nucleotide sequence <SEQ ID 2> is:

| | |
|---|---|
| 1 | ATGAAAAAAA AATTATCATT ACTTGTAGGT TTAATTTTTG TTTTGAGTTC |
| 51 | TTGCCATAAG GAAGATGCTC AGAATAAAAT ACGTATTGTA GCCAGTCCGA |
| 101 | CACCTCATGC GGAATTATTG GAGAGTTTAC AGGAAGAGGC TAAAGATCTT |
| 151 | GGAATCAAGC TGAAAATACT TCCAGTAGAT GATTATCGTA TTCCTAATCG |
| 201 | TTTGCTTTTG GATAAACAAG TAGATGCAAA TTACTTTCAA CATCAAGCTT |
| 251 | TTCTTGATGA CGAATGCGAG CGTTATGATT GTAAGGGTGA ATTAGTTGTT |
| 301 | ATCGCTAAAG TTCATTTGGA ACCTCAAGCA ATTTATTCTA AGAAACATTC |
| 351 | TTCTTTAGAG CGCTTAAAAA GCCAGAAGAA ACTGACTATA GCGATTCCTG |
| 401 | TGGATCGTAC GAATGCTCAG CGTGCTCTAC ACTTGTTAGA AGAGTGCGGA |
| 451 | CTCATTGTTT GCAAAGGGCC TGCTAATTTA AATATGACAG CTAAAGATGT |
| 501 | CTGTGGGAAA GAAAATAGAA GTATCAACAT ATTAGAGGTG TCAGCTCCTC |
| 551 | TTCTTGTCGG ATCTCTTCCT GACGTTGATG CTGCTGTCAT TCCTGGAAAT |
| 601 | TTTGCTATAG CAGCAAACCT TTCTCCAAAG AAAGATAGTC TTTGTTTAGA |
| 651 | GGATCTTTCG GTATCTAAGT ATACAAACCT TGTTGTCATT CGTTCTGAAG |
| 701 | ACGTAGGTTC TCCTAAAATG ATAAAATTAC AGAAGCTGTT TCAATCTCCT |
| 751 | TCTGTACAAC ATTTTTTTGA TACAAAATAT CATGGGAATA TTTTGACAAT |
| 801 | GACTCAAGAC AATGGTTAG |

[0314] The PSORT algorithm predicts an inner membrane location (0.127).

[0315] The protein was expressed in E. coli and purified as a his-tag product, as shown in FIG. 1A, and also as a GST-fusion. The recombinant protein was used to immunise mice, whose sera were used in a Western blot (FIG. 1B) and for FACS analysis (FIG. 1C).

[0316] The cp6552 protein was also identified in the 2D-PAGE experiment (Cpn0278).

[0317] These experiments show that cp6552 is a surface-exposed and immunoaccessible protein, and that it is a useful immunogen. These properties are not evident from the sequence alone.

### Example 2

[0318] The following C. pneumoniae protein (PID 4376736) was expressed <SEQ ID 3; cp6736>:

| | |
|---|---|
| 1 | MKTSIRKFLI STTLAPCFAS TAFTVEVIMP SENFDGSSGK IFPYTTLSDP |
| 51 | RGTLCIFSGD LYIANLDNAI SRTSSSCFSN RAGALQILGK GGVFSFLNIR |
| 101 | SSADGAAISS VITQNPELCP LSFSGFSQMI FDNCESLTSD TSASNVIPHA |
| 151 | SAIYATTPML FTNNDSILFQ YNRSAGFGAA IRGTSITIEN TKKSLLFNGN |
| 201 | GSISNGGALT GSAAINLINN SAPVIFSTNA TGIYGGAIYL TGGSMLTSGN |
| 251 | LSGVLFVNNS SRSGGAIYAN GNVTFSNNSD LTFQNNTASP QNSLPAPTPP |
| 301 | PTPPAVTPLL GYGGAIFCTP PATPPPTGVS LTISGENSVT FLENIASEQG |
| 351 | GALYGKKISI DSNKSTIFLG NTAGKGGAIA IPESGELSLS ANQGDILFNK |
| 401 | NLSITSGTPT RNSIHPGKDA KFATLGATQG YTLYFYDPIT SDDLSAASAA |
| 451 | ATVVVNPKAS ADGAYSGTIV FSGETLTATE AATPANATST LNQKLELEGG |
| 501 | TLALRNGATL NVHNFTQDEK SVVIMDAGTT LATTNGANNT DGAITLNKLV |
| 551 | INLDSLDGTK AAVVNVQSTN GALTISGTLG LVKNSQDCCD NHGMFNKDLQ |
| 601 | QVPILELKAT SNTVTTTDFS LGTNGYQQSP YGYQGTWEFT IDTTTHTVTG |
| 651 | NWKKTGYLPH PERLAPLIPN SLWANVIDLR AVSQASAADG EDVPGKQLSI |
| 701 | TGITNFFHAN HTGDARSYRH MGGGYLINTY TRITPDAALS LGFGQLFTKS |
| 751 | KDYLVGHGHS NVYPAPVYSN ITKSLFGSSR FFSGGTSRVT YSRSNEKVKT |
| 801 | SYTKLPKGRC SWSNNCWLGE LEGNLPITLS SRILNLKQII PFVKAEVAYA |
| 851 | THGGIQENTP EGRIFGHGHL LNVAVPVGVR FGKNSHNRPD FYTIIVAYAP |
| 901 | DVYRHNPDCD TTLPINGATW TSIGNNLTRS TLLVQASSHT SVNDVLEIFG |
| 951 | HCGCDIRRTS RQYTLDIGSK LRF* |

[0319] A predicted signal peptide is highlighted.

[0320] The cp6736 nucleotide sequence <SEQ ID 4> is:

| | |
|---|---|
| 1 | ATGAAAACGT CTATTCGTAA GTTCTTAATT TCTACCACAC TGGCGCCATG |
| 51 | TTTTGCTTCA ACAGCGTTTA CTGTAGAAGT TATCATGCCT TCCGAGAACT |
| 101 | TTGATGGATC GAGTGGGAAG ATTTTTCCTT ACACAACACT TTCTGATCCT |
| 151 | AGAGGGACAC TCTGTATTTT TTCAGGGGAT CTCTACATTG CCAATCTTGA |
| 201 | TAATGCCATA TCCAGAACCT CTTCCAGTTG CTTTAGCAAT AGGGCGGGAG |
| 251 | CACTACAAAT CTTAGGAAAA GGTGGGGTTT TCTCCTTCTT AAATATCCGT |
| 301 | TCTTCAGCTG ACGGAGCCGC GATTAGTAGT GTAATCACCC AAAATCCTGA |
| 351 | ACTATGTCCC TTGAGTTTTT CAGGATTTAG TCAGATGATC TTCGATAACT |
| 401 | GTGAATCTTT GACTTCAGAT ACCTCAGCGA GTAATGTCAT ACCTCACGCA |
| 451 | TCGGCGATTT ACGCTACAAC GCCCATGCTC TTTACAAACA ATGACTCCAT |
| 501 | ACTATTCCAA TACAACCGTT CTGCAGGATT TGGAGCTGCC ATTCGAGGCA |
| 551 | CAAGCATCAC AATAGAAAAT ACGAAAAAGA GCCTTCTCTT TAATGGTAAT |
| 601 | GGATCCATCT CTAATGGAGG GGCCCTCACG GGATCTGCAG CGATCAACCT |
| 651 | CATCAACAAT AGCGCTCCTG TGATTTTCTC AACGGGATCT ACAGGGATCT |
| 701 | ATGGTGGGGC TATTTACCTT ACCGGAGGAT CTATGCTCAC CTCTGGGAAC |
| 751 | CTCTCAGGAG TCTTGTTCGT TAATAATAGC TCGCGCTCAG GAGGCGCTAT |
| 801 | CTATGCTAAC GGAAATGTCA CATTTTCTAA TAACAGCGAC CTGACTTTCC |
| 851 | AAAACAATAC AGCATCTCCA CAAAACTCCT TACCTGCACC TACACCTCCA |
| 901 | CCTACACCAC CAGCAGTCAC TCCTTTGTTA GGATATGGAG GCGCCATCTT |
| 951 | CTGTACTCCT CCAGCTACCC CCCCACCAAC AGGTGTTAGC CTGACTATAT |
| 1001 | CTGGAGAAAA CAGCGTTACA TTCCTAGAAA ACATTGCCTC CGAACAAGGA |
| 1051 | GGAGCCCTCT ATGGCAAAAA GATCTCTATA GATTCTAATA AATCTACAAT |
| 1101 | ATTTCTTGGA AATACAGCTG GAAAAGGAGG CGCTATTGCT ATTCCCGAAT |
| 1151 | CTGGGGAGCT CTCTCTATCC GCAAATCAAG GTGATATCCT CTTTAACAAG |
| 1201 | AACCTCAGCA TCACTAGTGG GACACCTACT CGCAATAGTA TTCACTTCGG |
| 1251 | AAAAGATGCC AAGTTTGCCA CTCTAGGAGC TACGCAAGGC TATACCCTAT |
| 1301 | ACTTCTATGA TCCGATTACA TCTGATGATT TATCTGCTGC ATCCGCAGCC |
| 1351 | GCTACTGTGG TCGTCAATCC CAAAGCCAGT GCAGATGGTG CGTATTCAGG |
| 1401 | GACTATTGTC TTTTCAGGAG AAACCCTCAC TGCTACCGAA GCAGCAACCC |
| 1451 | CTGCAAATGC TACATCTACA TTAAACCAAA AGCTAGAACT TGAAGGCGGT |
| 1501 | ACTCTCGCTT TAAGAAACGG TGCTACCTTA AATGTTCATA ACTTCACGCA |
| 1551 | AGATGAAAAG TCCGTCGTCA TCATGGATGC AGGGACCACA TTAGCAACTA |
| 1601 | CAAATGGAGC TAATAATACT GACGGTGCTA TCACCTTAAA CAAGCTTGTA |
| 1651 | ATCAATCTGG ATTCTTTGGA TGGCACTAAA GCGGCTGTCG TTAATGTGCA |
| 1701 | GAGTACCAAT GGAGCTCTCA CTATATCCGG AACTTTAGGA CTTGTGAAAA |
| 1751 | ACTCTCAAGA TTGCTGTGAC AACCACGGGA TGTTTAATAA AGATTTACAG |
| 1801 | CAAGTTCCGA TTTTAGAACT CAAAGCGACT TCAAATACTG TAACCACTAC |
| 1851 | GGACTTCAGT CTCGGCACAA ACGGCTATCA GCAATCTCCC TATGGGTATC |
| 1901 | AAGGAACTTG GGAGTTTACC ATAGACACGA CAACCCATAC GGTCACAGGA |
| 1951 | AATTGGAAAA AAACCGGTTA TCTTCCTCAT CCGGAGCGTC TTGCTCCCCT |
| 2001 | CATTCCTAAT AGCCTATGGG CAAACGTCAT AGATTTACGA GCTGTAAGTC |
| 2051 | AAGCGTCAGC AGCTGATGGC GAAGATGTCC CTGGGAAGCA ACTGAGCATC |
| 2101 | ACAGGAATTA CAAATTTCTT CCATGCGAAT CATACCGGTG ATGCACGCAG |
| 2151 | CTACCGCCAT ATGGGTGGAG GCTACCTCAT CAATACCTAC ACACGCATCA |
| 2201 | CTCCAGATGC TGCGTTAAGT CTAGGTTTTG GACAGCTGTT TACAAAATCT |
| 2251 | AAGGATTACC TCGTAGGTCA CGGTCATTCT AACGTTTATT TCGCTACAGT |
| 2301 | ATACTCTAAC ATCACCAAGT CTCTGTTTGG ATCATCGAGA TTCTTCTCAG |
| 2351 | GAGGCACTTC TCGAGTTACC TATAGCCGTA GCAATGAGAA AGTAAAGACT |
| 2401 | TCATATACAA AATTGCCTAA AGGGCGCTGC TCTTGGAGTA ACAATTGCTG |
| 2451 | GTTAGGAGAA CTCGAAGGGA ACCTTCCCAT CACTCTCTCT TCTCGCATCT |
| 2501 | TAAACCTCAA GCAGATCATT CCCTTTGTAA AAGCTGAAGT TGCTTACGCG |
| 2551 | ACTCATGGGG GCATCCAAGA AAATACCCCC GAGGGGAGGA TTTTTGGACA |
| 2601 | CGGTCATCTA CTCAACGTTG CAGTTCCCGT AGGCGTCCGC TTTGGTAAAA |
| 2651 | ATTCTCATAA TCGACCAGAT TTTTACACTA TAATCGTAGC CTATGCTCCT |
| 2701 | GATGTCTATC GTCACAATCC TGATTGCGAT ACGACATTAC CTATTAATGG |
| 2751 | AGCTACGTGG ACCTCTATAG GGAATAATCT AACCAGAAGT ACTTTGCTAG |
| 2801 | TACAAGCATC CAGCCATACT TCAGTAAATG ATGTTCTAGA GATCTTCGGG |
| 2851 | CACTGTGGAT GTGATATTCG CAGAACCTCC CGTCAATATA CTCTAGATAT |
| 2901 | AGGAAGCAAA TTACGATTTT AA |

[0321] The PSORT algorithm predicts an outer membrane location (0.917).

[0322] The protein was expressed in E. coli and purified as a his-tag product, as shown in FIG. 2A, and also as a GST-fusion. Both proteins were used to immunise mice, whose sera were used in a Western blot (FIG. 2B) and for FACS analysis (FIG. 2C).

[0323] The cp6736 protein was also identified in the 2D-PAGE experiment (Cpn0453) and showed good cross-reactivity with human sera, including sera from patients with pneumonitis.

[0324] These experiments show that cp6736 is a surface-exposed and immunoaccessible protein, and that it is a useful immunogen. These properties are not evident from the sequence alone.

### Example 3

[0325] The following C. pneumoniae protein (PID 4376751) was expressed <SEQ ID 5; cp6751>:

| | |
|---|---|
| 1 | MRFFCFGMLL PFTFVLANEG LQLPLETYIT LSPEYQAAPQ VGFTHNQNQD |
| 51 | LAIVGNHNDF ILDYKYYRSN GGALTCKNLL ISENIGNVFF EKNVCPNSGG |
| 101 | AIYAAQNCTI SKNQNYAFTT NLVSDNPTAT AGSLLGGALF AINCSITNNL |
| 151 | GQGTFVDNLA LNKGGALYTE TNLSIKDNKG PIIIKQNRAL NSDSLGGGIY |
| 201 | SGNSLNIEGN SGAIQITSNS SGSGGGIFST QTLTISSNKK LIEISENSAF |
| 251 | ANNYGSNFNP GGGGLTTTFC TILNNREGVL FNNNQSQSNG GAIHAKSIII |
| 301 | KENGPVYFLN NTATRGGALL NLSAGSGNGS FILSADNGDI IFNNNTASKH |
| 351 | ALNPPYRNAI HSTPNMNLQI GARPGYRVLF YDPIEHELPS SFPILFNFET |
| 401 | GHTGTVLFSG EHVHQNFTDE MNFFSYLRNT SELRQGVLAV EDGAGLAQYK |
| 451 | FFQRGGTLLL GQGAVITTAG TIPTPSSTPT TVGSTITLNH IAIDLPSILS |
| 501 | FQAQAPKIWI YPTKTGSTYT EDSNPTITIS GTLTLRNSNN EDPYDSLDLS |
| 551 | HSLEKVPLLY IVDVAAQKIN SSQLDLSTLN SGEHYGYQGI WSTYWVETTT |
| 601 | ITNPTSLLGA NTKHKLLYAN WSPLGYRPHP ERRGEFITNA LWQSAYTALA |
| 651 | GLHSLSSWDE EKGHAASLQG IGLLVHQKDK NGFKGFRSHM TGYSATTEAT |
| 701 | SSQSPNFSLG FAQFFSKAKE HESQNSTSSH HYFSGMCIEN TLFKEWIRLS |
| 751 | VSLAYMFTSE HTHTMYQGLL EGNSQGSFHN HTLAGALSCV PLPQPHGESL |
| 801 | QIYPFITALA IRGNLAAFQE SGDHAREFSL HRPLTDVSLP VGIRASWKNH |
| 851 | HRVPLVWLTE ISYRSTLYRQ DPELHSKLLI SQGTWTTQAT PVTYNALGIK |
| 901 | VKNTMQVFPK VTLSLDYSAD ISSSTLSHYL NVASRMRF* |

[0326] A predicted signal peptide is highlighted.

[0327] The cp6751 nucleotide sequence <SEQ ID 6> is:

| | |
|---|---|
| 1 | ATGCGCTTTT TTTGCTTCGG AATGTTGCTT CCTTTTACTT TTGTATTGGC |
| 51 | TAATGAAGGT CTCCAACTTC CTTTGGAGAC CTATATTACA TTAAGTCCTG |
| 101 | AATATCAAGC AGCCCCTCAA GTAGGGTTTA CTCATAACCA AAATCAAGAT |
| 151 | CTCGCAATTG TCGGGAATCA CAATGATTTC ATCTTGGACT ATAAGTACTA |
| 201 | TCGGTCGAAT GGAGGTGCTC TTACCTGTAA GAATCTTCTG ATCTCTGAAA |
| 251 | ATATAGGGAA TGTCTTCTTT GAGAAGAATG TCTGTCCCAA TTCTGGCGGG |
| 301 | GCAATTTATG CTGCTCAAAA TTGCACGATC TCCAAGAATC AGAACTATGC |
| 351 | ATTTACTACA AACTTGGTCT CTGACAATCC TACAGCCACT GCGGGATCAC |
| 401 | TATTGGGTGG AGCTCTCTTT GCCATAAATT GCTCTATTAC TAATAACCTA |
| 451 | GGACAGGGAA CTTTCGTTGA CAATCTCGCT TTAAATAAGG GGGGTGCCCT |
| 501 | CTATACTGAG ACGAACTTAT CTATTAAAGA CAATAAAGGC CCGATCATAA |
| 551 | TCAAGCAGAA TCGGGCACTA AATTCGGACA GTTTAGGAGG AGGGATTTAT |
| 601 | AGTGGGAACT CTCTAAATAT AGAGGGAAAT TCTGGAGCTA TACAGATCAC |
| 651 | AAGCAACTCT TCAGGATCTG GGGGAGGCAT ATTTTCTACC CAAACACTCA |
| 701 | CGATCTCCTC GAATAAAAAA CTCATAGAAA TCAGTGAAAA TTCCGCGTTC |
| 751 | GCAAATAACT ATGGATCGAA CTTCAATCCA GGAGGAGGAG GTCTTACTAC |
| 801 | CACCTTTTGC ACGATATTGA ACAACCGAGA AGGGGTACTC TTTAACAATA |
| 851 | ACCAAAGCCA GAGCAACGGT GGAGCCATTC ATGCGAAATC TATCATTATC |
| 901 | AAAGAAAATG GTCCTGTATA CTTTTTAAAT AACACTGCAA CTCGGGGAGG |
| 951 | GGCTCTCCTC AACTTATCAG CAGGTTCTGG AAACGGAAGC TTCATCTTAT |
| 1001 | CTGCAGATAA TGGAGATATT ATCTTTAACA ATAATACGGC CTCCAAGCAT |
| 1051 | GCCCTCAATC CTCCATACAG AAACGCCATT CACTCGACTC CTAATATGAA |
| 1101 | TCTGCAAATA GGAGCCCGTC CCGGCTATCG AGTGCTGTTC TATGATCCCA |
| 1151 | TAGAACATGA GCTCCCTTCC TCCTTCCCCA TACTCTTTAA TTTCGAAACC |
| 1201 | GGTCATACAG GTACAGTTTT ATTTTCAGGG GAACATGTAC ACCAGAACTT |
| 1251 | TACCGATGAA ATGAATTTCT TTTCCTATTT AAGGAACACT TCGGAACTAC |
| 1301 | GTCAAGGAGT CCTTGCTGTT GAAGATGGTG CGGGGCTGGC CTGCTATAAG |
| 1351 | TTCTTCCAAC GAGGAGGCAC TCTACTTCTA GGTCAAGGTG CGGTGATCAC |
| 1401 | GACAGCAGGA ACGATTCCCA CACCATCCTC AACACCAACG ACAGTAGGAA |
| 1451 | GTACTATAAC TTTAAATCAC ATTGCCATTG ACCTTCCTTC TATTCTTTCT |
| 1501 | TTTCAAGCTC AGGCTCCAAA AATTTGGATT TACCCCACAA AAACAGGATC |
| 1551 | TACCTATACT GAAGATTCCA ACCCGACAAT CACAATCTCA GGAACTCTCA |
| 1601 | CCTTACGCAA CAGCAACAAC GAAGATCCCT ACGATAGTCT GGATCTCTCG |
| 1651 | CACTCTCTTG AGAAAGTTCC CCTTCTTTAT ATTGTCGATG TCGCTGCACA |
| 1701 | AAAAATTAAC TCTTCGCAAC TGGATCTATC CACATTAAAT TCTGGCGAAC |
| 1751 | ACTATGGGTA TCAAGGCATC TGGTCGACCT ATTGGGTAGA AACTACAACA |
| 1801 | ATCACGAACC CTACATCTCT ACTAGGCGCG AATACAAAAC ACAAGCTGCT |
| 1851 | CTATGCAAAC TGGTCTCCTC TAGGCTACCG TCCTCATCCC GAACGTCGAG |
| 1901 | GAGAATTCAT TACGAATGCC TTGTGGCAAT CGGCATATAC GGCTCTTGCA |
| 1951 | GGACTCCACT CCCTCTCCTC CTGGGATGAA GAGAAGGGTC ATGCAGCTTC |
| 2001 | CCTACAAGGC ATTGGTCTTC TGGTTCATCA AAAAGACAAA AACGGTTTTA |
| 2051 | AGGGATTTCG TAGTCATATG ACAGGTTATA GTGCTACCAC CGAAGCAACC |
| 2101 | TCTTCTCAAA GTCCGAATTT CTCTTTAGGA TTTGCTCAGT TCTTCTCCAA |
| 2151 | AGCTAAAGAA CATGAATCTC AAAATAGCAC GTCCTCTCAC CACTATTTCT |
| 2201 | CTGGAATGTG CATAGAAAAT ACTCTCTTCA AAGAGTGGAT ACGTCTATCT |
| 2251 | GTGTCTCTTG CTTATATGTT TACCTCGGAA CATACCCATA CAATGTATCA |
| 2301 | GGGTCTCCTG GAAGGGAACT CTCAGGGATC TTTCCACAAC CATACCTTAG |
| 2351 | CAGGGGCTCT CTCCTGTGTT TTCTTACCTC AACCTCACGG CGAGTCCCTG |
| 2401 | CAGATCTATC CCTTTATTAC TGCCTTAGCC ATCCGAGGAA ATCTTGCTGC |
| 2451 | GTTTCAAGAA TCTGGAGACC ATGCTCGGGA ATTTTCCCTA CACCGCCCCC |
| 2501 | TAACGGACGT CTCCCTCCCT GTAGGAATCC GCGCTTCTTG GAAGAACCAC |
| 2551 | CACCGAGTTC CCCTAGTCTG GCTCACAGAA ATTTCCTATC GCTCTACTCT |
| 2601 | CTATAGGCAA GATCCTGAAC TCCACTCGAA ATTACTGATT AGCCAAGGTA |
| 2651 | CGTGGACGAC GCAGGCCACT CCTGTGACCT ACAATGCTTT AGGGATCAAA |
| 2701 | GTGAAAAATA CCATGCAGGT GTTTCCTAAA GTCACTCTCT CCTTAGATTA |
| 2751 | CTCTGCGGAT ATTTCTTCCT CCACGCTGAG TCACTACTTA AACGTGGCGA |
| 2801 | GTAGAATGAG ATTTTAA |

[0328] The PSORT algorithm predicts an outer membrane location (0.923).

[0329] The protein was expressed in E. coli and purified as a GST-fusion product, as shown in FIG. 3A, and also in his-tagged form. The GST-fusion recombinant protein was used to immunise mice, whose sera were used in a Western blot (FIG. 3B) and for FACS analysis (FIG. 3C).

[0330] This protein also showed good cross-reactivity with human sera, including sera from patients with pneumonitis.

[0331] These experiments show that cp6751 is a surface-exposed and immunoaccessible protein, and that it is a useful immunogen. These properties are not evident from the sequence alone.

### Example 4

[0332] The following C. pneumoniae protein (PID 4376752) was expressed <SEQ ID 7; cp6752>:

| | |
|---|---|
| 1 | MFGMTPAVYS LQTDSLEKFA LERDEEFRTS FPLLDSLSTL TGFSPITTFV |
| 51 | GNRHNSSQDI VLSNYKSIDN ILLLWTSAGG AVSCNNFLLS NVEDHAFFSK |
| 101 | NLAIGTGGAI ACQGACTITK NRGPLIFFSN RGLNNASTGG ETRGGAIACN |
| 151 | GDFTISQNQG TFYFVNNSVN NWGGALSTNG HCRIQSNRAP LLFFNNTAPS |
| 201 | GGGALRSENT TISDNTRPIY FKNNCGNNGG AIQTSVTVAI KNNSGSVIFN |
| 251 | NNTALSGSIN SGNGSGGAIY TTNLSIDDNP GTILFNNNYC IRDGGAICTQ |
| 301 | FLTIKNSGHV YFTNNQGNWG GALMLLQDST CLLFAEQGNI AFQNNEVFLT |
| 351 | TFGRYNAIHC TPNSNLQLGA NKGYTTAFFD PIEHQHPTTN PLIFNPNANH |
| 401 | QGTILFSSAY IPEASDYENN FISSSKNTSE LRNGVLSIED RAGWQFYKFT |
| 451 | QKGGILKLGH AASIATTANS ETPSTSVGSQ VIINNLAINL PSILARGKAP |
| 501 | TLWIRPLQSS APFTEDNNPT ITLSGPLTLL NEENRDPYDS IDLSEPLQNI |
| 551 | HLLSLSDVTA RHINTDNFHP ESLNATEHYG YQGIWSPYMV ETITTTNNAS |
| 601 | IETANTLYRA LYANWTPLGY KVNPEYQGDL ATTPLWQSPH TMFSLLRSYN |
| 651 | RTGDSDIERP FLEIQGIADG LFVHQNSIPG APGFRIQSTG YSLQASSETS |
| 701 | LHQKISLGFA QFFTRTKEIG SSNNVSAHNT VSSLYVELPW FQEAFATSTV |
| 751 | LAYGYGDHHL HSLHPSHQEQ AEGTCYSHTL AAAIGCSFPW QQKSYLHLSP |
| 801 | FVQAIAIRSH QTAFEEIGDN PRKFVSQKPF YNLTLPLGIQ GKWQSKFHVP |
| 851 | TEWTLELSYQ PVLYQQNPQI GVTLLASGGS WDILGHNYVR NALGYKVHNQ |
| 901 | TALFRSLDLF LDYQGSVSSS TSTHHLQAGS TLKF* |

[0333] The cp6752 nucleotide sequence <SEQ ID 8> is:

| | |
|---|---|
| 1 | ATGTTCGGGA TGACTCCTGC AGTGTATAGT TTACAAACGG ACTCCCTTGA |
| 51 | AAAGTTTGCT TTAGAGAGGG ATGAAGAGTT TCGTACGAGC TTTCCTCTCT |
| 101 | TAGACTCTCT CTCCACTCTT ACAGGATTTT CTCCAATAAC TACGTTTGTT |
| 151 | GGAAATAGAC ATAATTCCTC TCAAGACATT GTACTTTCTA ACTACAAGTC |
| 201 | TATTGATAAC ATCCTTCTTC TTTGGACATC GGCTGGGGGA GCTGTGTCCT |
| 251 | GTAATAATTT CTTATTATCA AATGTTGAAG ACCATGCCTT CTTCAGTAAA |
| 301 | AATCTCGCGA TTGGGACTGG AGGCGCGATT GCTTGCCAGG GAGCCTGCAC |
| 351 | AATCACGAAG AATAGAGGAC CCCTTATTTT TTTCAGCAAT CGAGGTCTTA |
| 401 | ACAATGCGAG TACAGGAGGA GAAACTCGTG GGGGTGCGAT TGCCTGTAAT |
| 451 | GGAGACTTCA CGATTTCTCA AAATCAAGGG ACTTTCTACT TTGTCAACAA |
| 501 | TTCCGTCAAC AACTGGGGAG GAGCCCTCTC CACCAATGGA CACTGCCGCA |
| 551 | TCCAAAGCAA CAGGGCACCT CTACTCTTTT TTAACAATAC AGCCCCTAGT |
| 601 | GGAGGGGGTG CGCTTCGTAG TGAAAATACA ACGATCTCTG ATAACACGCG |
| 651 | TCCTATTTAT TTTAAGAACA ACTGTGGGAA CAATGGCGGG GCCATTCAAA |
| 701 | CAAGCGTTAC TGTTGCGATA AAAAATAACT CCGGGTCGGT GATTTTCAAT |
| 751 | AACAACACAG CGTTATCTGG TTCGATAAAT TCAGGAAATG GTTCAGGAGG |
| 801 | GGCGATTTAT ACAACAAACC TATCCATAGA CGATAACCCT GGAACTATTC |
| 851 | TTTTCAATAA TAACTACTGC ATTCGCGATG GCGGAGCTAT CTGTACACAA |
| 901 | TTTTTGACAA TCAAAAATAG TGGCCACGTA TATTTCACCA ACAATCAAGG |
| 951 | AAACTGGGGA GGTGCTCTTA TGCTCCTACA GGACAGCACC TGCCTACTCT |
| 1001 | TCGCGGAACA AGGAAATATC GCATTTCAAA ATAATGAGGT TTTCCTCACC |
| 1051 | ACATTTGGTA GATACAACGC CATACATTGT ACACCAAATA GCAACTTACA |
| 1101 | ACTTGGAGCT AATAAGGGGT ATACGACTGC TTTTTTTGAT CCTATAGAAC |
| 1151 | ACCAACATCC AACTACAAAT CCTCTAATCT TTAATCCCAA TGCGAACCAT |
| 1201 | CAGGGAACGA TCTTATTTTC TTCAGCCTAT ATCCCAGAAG CTTCTGACTA |
| 1251 | CGAAAATAAT TTCATTAGCA GCTCGAAAAA TACCTCTGAA CTTCGCAATG |
| 1301 | GTGTCCTCTC TATCGAGGAT CGTGCGGGAT GGCAATTCTA TAAGTTCACT |
| 1351 | CAAAAAGGAG GTATCCTTAA ATTAGGGCAT GCGGCGAGTA TTGCAACAAC |
| 1401 | TGCCAACTCT GAGACTCCAT CAACTAGTGT AGGCTCCCAG GTCATCATTA |
| 1451 | ATAACCTTGC GATTAACCTC CCCTCGATCT TAGCAAAAGG AAAAGCTCCT |
| 1501 | ACCTTGTGGA TCCGTCCTCT ACAATCTAGT GCTCCTTTCA CAGAGGACAA |
| 1551 | TAACCCTACA ATTACTTTAT CAGGTCCTCT GACACTCTTA AATGAGGAAA |
| 1601 | ACCGCGATCC CTACGACAGT ATAGATCTCT CTGAGCCTTT ACAAAACATT |
| 1651 | CATCTTCTTT CTTTATCGGA TGTAACAGCA CGTCATATCA ATACCGATAA |
| 1701 | CTTTCATCCT GAAAGCTTAA ATGCGACTGA GCATTACGGT TATCAAGGCA |
| 1751 | TCTGGTCTCC TTATTGGGTA GAGACGATAA CAACAACAAA TAACGCTTCT |
| 1801 | ATAGAGACGG CAAACACCCT CTACAGAGCT CTGTATGCCA ATTGGACTCC |
| 1851 | CTTAGGATAT AAGGTCAATC CTGAATACCA AGGAGATCTT GCTACGACTC |
| 1901 | CCCTATGGCA ATCCTTTCAT ACTATGTTCT CTCTATTAAG AAGTTATAAT |
| 1951 | CGAACTGGTG ATTCTGATAT CGAGAGGCCT TTCTTAGAAA TTCAAGGGAT |
| 2001 | TGCCGACGGC CTCTTTGTTC ATCAAAATAG CATCCCCGGG GCTCCAGGAT |
| 2051 | TCCGTATCCA ATCTACAGGG TATTCCTTAC AAGCATCCTC CGAAACTTCT |
| 2101 | TTACATCAGA AAATCTCCTT AGGTTTTGCA CAGTTCTTCA CCCGCACTAA |
| 2151 | AGAAATCGGA TCAAGCAACA ACGTCTCGGC TCACAATACA GTCTCTTCAC |
| 2201 | TTTATGTTGA GCTTCCGTGG TTCCAAGAGG CCTTTGCAAC ATCCACAGTG |
| 2251 | TTAGCGTATG GCTATGGGGA CCATCACCTC CACAGCCTAC ATCCCTCACA |
| 2301 | TCAAGAACAG GCAGAAGGGA CGTGTTATAG CCATACATTA GCAGCAGCTA |
| 2351 | TCGGCTGTTC TTTCCCTTGG CAACAGAAAT CCTATCTTCA CCTCAGCCCG |
| 2401 | TTCGTTCAGG CAATTGCAAT ACGTTCTCAC CAAACAGCGT TCGAAGAGAT |
| 2451 | TGGTGACAAT CCCCGAAAGT TTGTCTCTCA AAAGCCTTTC TATAATCTGA |
| 2501 | CCTTACCTCT AGGAATCCAA GGAAAATGGC AGTCAAAATT CCACGTACCT |
| 2551 | ACAGAATGGA CTCTAGAACT TTCTTACCAA CCGGTACTCT ATCAACAAAA |
| 2601 | TCCCCAAATC GGTGTCACGC TACTTGCGAG CGGAGGTTCC TGGGATATCC |
| 2651 | TAGGCCATAA CTATGTTCGC AATGCTTTAG GGTACAAAGT CCACAATCAA |
| 2701 | ACTGCGCTCT TCCGTTCTCT CGATCTATTC TTGGATTACC AAGGATCGGT |
| 2751 | CTCCTCCTCG ACATCTACGC ACCATCTCCA AGCAGGAAGT ACCTTAAAAT |
| 2801 | TCTAA |

[0334] The PSORT algorithm predicts a cytoplasmic location (0.138).

[0335] The protein was expressed in E. coli and purified as a his-tag product, as shown in FIG. 4A, and also as a GST-fusion. The recombinant proteins were used to immunise mice, whose sera were used in a Western blot (4B) and the his-tagged protein was used for FACS analysis (4C).

[0336] The cp6752 protein was also identified in the 2D-PAGE experiment (Cpn0467).

[0337] These experiments show that cp6752 is a surface-exposed and immunoaccessible protein, and that it is a useful immunogen. These properties are not evident from the sequence alone.

### Example 5

[0338] The following C. pneumoniae protein (PID 4376850) was expressed <SEQ ID 9; cp6850>:

| | |
|---|---|
| 1 | MKKAVLIAAM FCGVVBLSBC CRIVDCCFBP PCAPSSCNPC |

EVIRKKERSC

| | |
|---|---|
| 51 | GGNACGSYVP SCSNPCGSTE CNSQSPQVKG CTSPDGRCKQ * |

[0339] A predicted signal peptide is highlighted.

[0340] The cp6850 nucleotide sequence <SEQ ID 10> is:

| | |
|---|---|
| 1 | ATGAAGAAAG CTGTTTTAAT TGCTGCAATG TTTTGTGGAG |

TAGTTAGCTT

| | |
|---|---|
| 51 | AAGTAGCTGC TGCCGCATTG TAGATTGTTG TTTTGAGGAT |

CCTTGCGCAC

| | |
|---|---|
| 101 | CCTCTTCTTG CAATCCTTGT GAAGTAATAA GAAAAAAAGA |

AAGATCTTGC

| | |
|---|---|
| 151 | GGCGGTAATG CTTGTGGGTC CTACGTTCCT TCTTGTTCTA |

ATCCATGTGG

| | |
|---|---|
| 201 | TTCAACAGAG TGTAACTCTC AAAGCCCACA AGTTAAAGGT |

TGTACATCAC

| | |
|---|---|
| 251 | CTGATGGCAG ATGCAAACAG TAA |

[0341] The PSORT algorithm predicts an inner membrane location (0.329).

[0342] The protein was expressed in E. coli and purified as a GST-fusion product, as shown in FIG. 5A. The recombinant protein was used to immunise mice, whose sera were used in a Western blot (FIG. 5B) and for FACS analysis (FIG. 5B). A his-tagged protein was also expressed.

[0343] These experiments show that cp6850 is a surface-exposed and immunoaccessible protein, and that it is a useful immunogen. These properties are not evident from the sequence alone.

### Example 6

[0344] The following C. pneumoniae protein (PID 4376900) was expressed <SEQ ID 11; cp6900>:

| | |
|---|---|
| 1 | MKIKFSWKVN FLICLLAVGL IFFGCSRVKR EVLVGRDATW |

FPKQFGIYTS

| | |
|---|---|
| 51 | DTNAFLNKLV SEINYKENLN INIVNQDWVH LFENLDDKKT |

QGAFTSVLPT

| | |
|---|---|
| 101 | LEMLEHYQFS DPILLTGPVL VVAQDSPYQS IEDLKGRLIG |

VYKFDSSVLV

| | |
|---|---|
| 151 | AQNIPDAVIS LYQHVPIALE ALTSNCYDAL LAPVIEVTAL |

IETAYKGRLL

| | |
|---|---|
| 201 | IISKPLNADG LRLAILKGTN GDLLEGFNAG LVKTRRSGKY |

DAIKQRYRLP

[0345] The cp6900 nucleotide sequence <SEQ ID 12> is:

| | |
|---|---|
| 1 | GTGAAGATAA AATTTTCTTG GAAGGTAAAT TTTTTAATAT |

GTTTACTGGC

| | |
|---|---|
| 51 | TGTGGGACTG ATCTTTTTCG GGTGCTCTCG AGTAAAAAGA |

GAAGTTCTCG

| | |
|---|---|
| 101 | TAGGTCGTGA TGCCACCTGG TTTCCAAAAC AATTCGGCAT |

TTATACATCC

| | |
|---|---|
| 151 | GATACCAACG CATTTTTAAA CGATCTTGTT TCTGAGATTA |

ACTATAAAGA

| | |
|---|---|
| 201 | GAATCTAAAT ATTAATATTG TAAATCAAGA TTGGGTGCAT |

CTCTTTGAGA

| | |
|---|---|
| 251 | ATTTAGATGA TAAAAAGACC CAAGGAGCAT TTACATCTGT |

ATTGCCTACT

| | |
|---|---|
| 301 | CTTGAGATGC TCGAACACTA TCAATTTTCT GATCCCATTT |

TACTCACAGG

| | |
|---|---|
| 351 | TCCTGTCCTT GTCGTCGCTC AAGACTCTCC TTACCAATCT |

ATAGAGGATC

| | |
|---|---|
| 401 | TTAAAGGTCG TCTTATTGGA GTGTATAAGT TTGACTCTTC |

AGTTCTTGTA

| | |
|---|---|
| 451 | GCTCAAAATA TCCCTGACGC TGTGATTAGC CTCTACCAAC |

ATGTTCCAAT

| | |
|---|---|
| 501 | AGCATTGGAA GCCTTAACAT CGAATTGTTA CGACGCTCTT |

CTAGCTCCTG

| | |
|---|---|
| 551 | TAATTGAAGT GACCGCGCTA ATAGAAACAG CATATAAAGG |

AAGACTGAAA

| | |
|---|---|
| 601 | ATTATTTCAA AACCCTTAAA CGCAGATGGT TTGCGGCTTG |

CAATACTGAA

| | |
|---|---|
| 651 | AGGGACAAAC GGAGATTTGC TTGAAGGGTT TAACGCAGGA |

CTTGTGAAAA

| | |
|---|---|
| 701 | CACGACGCTC AGGAAAATAC GATGCTATAA AACAGCGGTA |

TCGTCTTCCC

| | |
|---|---|
| 751 | TAA |

[0346] The PSORT algorithm predicts an inner membrane location (0.452).

[0347] The protein was expressed in E. coli and purified as a GST-fusion product, as shown in FIG. 6A. The recombinant protein was used to immunise mice, whose sera were used for FACS analysis (FIG. 6B). A his-tagged protein was also expressed.

[0348] The cp6900 protein was also identified in the 2D-PAGE experiment (Cpn0604).

[0349] These experiments show that cp6900 is a surface-exposed and immunoaccessible protein, and that it is a useful immunogen. These properties are not evident from the sequence alone.

### Example 7

[0350] The following C. pneumoniae protein (PID 4377033) was expressed <SEQ ID 13; cp7033>:

| | |
|---|---|
| 1 | MVNPIGPGPI DETERTPPAD LSAQGLEASA ANKSAEAQRI |

AGAEAKPKES

| | |
|---|---|
| 51 | KTDSVERWSI LRSAVNALMS LADKLGIASS NSSSSTSRSA |

DVOSTTATAP

| | |
|---|---|
| 101 | TPPPPTFDDY KTQAQTAYDT IFTSTSLADI QAALVSLQDA |

VTNIKDTAAT

| | |
|---|---|
| 151 | DEEWAIAAEW ETRNADAVKV GAQITELAKY ASDNQAILDS |

LGKLTSFDLL

| | |
|---|---|
| 201 | QAALLQSVAN NNKAAELLKE MQDNPVVPGK TPAIAQSLVD |

QTDATATQIE

| | |
|---|---|
| 251 | KDGNAIRDAY FAGQNASGAV EWAXSNNSIS NIDSAXAAIA |

TAKTQIAEAQ

| | |
|---|---|
| 301 | KRFPDSPILQ EAEQMVIQAE KDLKNIKPAD GSDVPNPGTT |

VGGSKQQGSS

| | |
|---|---|
| 351 | IGSIRVSMLL DDAENETASI LMSGFRQMIH MFNTENPDSQ |

AAQQELAAQA

| | |
|---|---|
| 401 | RAARAAGDPS AAAALADAQK ALEAALGKAG QQQGILNALG |

QIASAAVVSA

| | |
|---|---|
| 451 | GVPPAAASSI GSSVKQLYKT SKBTGSDYKT QISAGYDAYK |

SINDAYGRAR

| | |
|---|---|
| 501 | NDATRDVINN VSTPALTRSV PRARTEARGP EKTDQALARV |

ESGNSRTLGD

| | |
|---|---|
| 551 | VYSQVSALQS VMQIIQSNPQ ANNEEIRQKL TSAVTKPPQF |

GYPYVQLSND

| | |
|---|---|
| 601 | STQKFIAKLE SLFAEGSRTA AEIKALSFET NSLFIQQVLV |

NIGSLYSGYL

| | |
|---|---|
| 651 | Q* |

[0351] The cp7033 nucleotide sequence <SEQ ID 14> is:

| | |
|---|---|
| 1 | ATGGTTAATC CTATTGGTCC AGGTCCTATA GACGAAACAG AACGCACACC |
| 51 | TCCCGCAGAT CTTTCTGCTC AAGGATTGGA GGCGAGTGCA GCAAATAAGA |
| 101 | GTGCGGAAGC TCAAAGAATA GCAGGTGCGG AAGCTAAGCC TAAAGAATCT |
| 151 | AAGACCGATT CTGTAGAGCG ATGGAGCATC TTGCGTTCTG CAGTGAATGC |
| 201 | TCTCATGAGT CTGGCAGATA AGCTGGGTAT TGCTTCTAGT AACAGCTCGT |
| 251 | CTTCTACTAG CAGATCTGCA GACGTGGACT CAACGACAGC GACCGCACCT |
| 301 | ACGCCTCCTC CACCCACGTT TGATGATTAT AAGACTCAAG CGCAAACAGC |
| 351 | TTACGATACT ATCTTTACCT CAACATCACT AGCTGACATA CAGGCTGCTT |
| 401 | TGGTGAGCCT CCAGGATGCT GTCACTAATA TAAAGGATAC AGCGGCTACT |
| 451 | GATGAGGAAA CCGCAATCGC TGCGGAGTGG GAAACTAAGA ATGCCGATGC |
| 501 | AGTTAAAGTT GGCCCGCAAA TTACAGAATT AGCGAAATAT GCTTCGGATA |
| 551 | ACCAAGCGAT TCTTGACTCT TTAGGTAAAC TGACTTCCTT CGACCTCTTA |
| 601 | CAGGCTGCTC TTCTCCAATC TGTAGCAAAC AATAACAAAG CAGCTGAGCT |
| 651 | TCTTAAAGAG ATGCAAGATA ACCCAGTAGT CCCAGGGAAA ACGCCTGCAA |
| 701 | TTGCTCAATC TTTAGTTGAT CAGACAGATG CTACAGCGAC ACAGATAGAG |
| 751 | AAAGATGGAA ATGCGATTAG GGATGCATAT TTTGCAGGAC AGAACGCTAG |
| 801 | TGGAGCTGTA GAAAATGCTA AATCTAATAA CAGTATAAGC AACATAGATT |
| 851 | CAGCTAAAGC AGCAATCGCT ACTGCTAAGA CACAAATAGC TGAAGCTCAG |
| 901 | AAAAAGTTCC CCGACTCTCC AATTCTTCAA GAAGCGGAAC AAATGGTAAT |
| 951 | ACAGGCTGAG AAAGATCTTA AAAATATCAA ACCTGCAGAT GGTTCTGATG |
| 1001 | TTCCAAATCC AGGAACTACA GTTGGAGGCT CCAAGCAACA AGGAAGTAGT |
| 1051 | ATTGGTAGTA TTCGTGTTTC CATGCTGTTA GATGATGCTG AAAATGAGAC |
| 1101 | CGCTTCCATT TTGATGTCTG GGTTTCGTCA GATGATTCAC ATGTTCAATA |
| 1151 | CGGAAAATCC TGATTCTCAA GCTGCCCAAC AGGAGCTCGC AGCACAAGCT |
| 1201 | AGAGCAGCGA AAGCCGCTGG AGATOACACT GCTGCTGCAG CGCTGGCAGA |
| 1251 | TGCTCAQAAA GCTTTAGAAG CGGCTCTAGG TAAAGCTGGG CAACAACAGG |
| 1301 | GCATACTCAA TGCTTTAGGA CAGATCGCTT CTGCTGCTGT TGTGAGCGCA |
| 1351 | GGAGTTCCTC CCGCTGCAGC AAGTTCTATA GGGTCATCTG TAAAACAGCT |
| 1401 | TTACAAGACC TCAAAATCTA CAGGTTCTGA TTATAAAACA CAGATATCAG |
| 1451 | CAGGTTATGA TGCTTACAAA TCCATCAATG ATGCCTATGG TAGGGCACGA |
| 1501 | AATGATGCGA CTCGTGATGT GATAAACAAT GTAAGTACCC CCGCTCTCAC |
| 1551 | ACGATCCGTT CCTAGAGCAC GAACAGAAGC TCGAGGACCA GAAAAAACAG |
| 1601 | ATCAAGCCCT CGCTAGGGTG ATTTCTGGCA ATAGCAGAAC TCTTCGAGAT |
| 1651 | GTCTATAGTC AAGTTTCGGC ACTACAATCT GTAATGCAGA TCATCCAGTC |
| 1701 | GAATCCTCAA GCGAATAATG AGGAGATCAG ACAAAAGCTT ACATCGGCAG |
| 1751 | TGACAAAGCC TCCACAGTTT GGCTATCCTT ATGTGCAACT TTCTAATGAC |
| 1801 | TCTACACAGA AGTTCATAGC TAAATTAGAA AGTTTGTTTG CTGAAGGATC |
| 1851 | TAGGACAGCA GCTGAAATAA AAGCACTTTC CTTTGAAACG AACTCCTTGT |
| 1901 | TTATTCAGCA GGTGCTGGTC AATATCGGCT CTCTATATTC TGGTTATCTC |
| 1951 | CAATAA |

[0352] The PSORT algorithm predicts a cytoplasmic location (0.272).

[0353] The protein was expressed in E. coli and purified as a GST-fusion product, as shown in FIG. 7A. A his-tagged protein was also expressed. The recombinant proteins were used to immunise mice, whose sera were used for FACS (FIG. 7B) and Western blot (7C) analyses.

[0354] The cp7033 protein was also identified in the 2D-PAGE experiment (Cpn0728) and showed good cross-reactivity with human sera, including sera from patients with pneumonitis.

[0355] These experiments show that cp7033 a surface-exposed and immunoaccessible protein, and that it is a useful immunogen. These properties are not evident from the sequence alone.

### Example 8

[0356] The following C. pneumoniae protein (PID 6172321) was expressed <SEQ ID 15; cp0017>:

| | |
|---|---|
| 1 | MGIKGTGIIV WVDDATAKTK NATLTWTKTG YKPNPERQGP |

LVPNSLWGSF

| | |
|---|---|
| 51 | VDVRSIQSLM DRSTSSLSSS TNLWVSGIAD FLHEDQKGNQ |

RSYRHSSAGY

| | |
|---|---|
| 101 | ALGGGFFTAS ENFFNPAFCQ LFGYDKDHLV AKNHTHVYAQ |

AMSYRHLGES

| | |
|---|---|
| 151 | KTLAKILSGN SDSLPFVFNA RFAYGHTDNN MTTKYTGYSP |

VKGSWGNDAF

| | |
|---|---|
| 201 | GIECGGAIPV VASGRRSWVD THTPFLNLEM IYAHQNDFKE |

NGTEGRSFQS

| | |
|---|---|
| 251 | EDLFNLAVPV GIKPEEFSDK STYDLSIAYV PDVIRNDPGC |

TTTLMVSGDS

| | |
|---|---|
| 301 | WSTCGTSLSR QALLVRAGNH HAFASNFEVF SQFEVELRGS |

SRSYAIDLGG

| | |
|---|---|
| 351 | RFGF* |

[0357] The cp0017 nucleotide sequence <SEQ ID 16> is:

| | |
|---|---|
| 1 | ATGGGTATCA AGGGAACTGG AATAATTGTT TGGGTCGACG |

ATGCAACTGC

| | |
|---|---|
| 51 | AAAAACAAAA AATGCTACCT TAACTTGGAC TAAAACAGGA |

TACAAGCCGA

| | |
|---|---|
| 101 | ATCCAGAACG TCAGGGACCT TTGGTTCCTA ATAGCCTGTG |

GGGTTCTTTT

| | |
|---|---|
| 151 | GTCGATGTCC GCTCCATTCA GAGCCTCATG GACCGGAGCA |

CAAGTFCGTT

| | |
|---|---|
| 201 | ATCTTCGTCA ACAAATTTGT GGGTATCAGG AATCGCGGAC |

TTTTTGCATQ

| | |
|---|---|
| 251 | AAGATCAGAA AGGAAACCTT CGTAGTTATC GTCATTCTAG |

CGCGGGTTAT

| | |
|---|---|
| 301 | GCATTAGGAG GAGGATTCTT CACGGCTTCT GAAAATTTCT |

TTAATTTTGC

| | |
|---|---|
| 351 | TTTTTGTCAG CTTTTTGGCT ACGACAAGGA CCATCTTGTG |

GCTAAGAACC

| | |
|---|---|
| 401 | ATACCCATGT ATATGCAGGG GCAATGAGTT ACCQACACCT |

CGGAGAGTCT

| | |
|---|---|
| 451 | AAGACCCTCC CTAAGATTTT GTCAGGAAAT TCTGACTCCC |

TACCTTTTGT

| | |
|---|---|
| 501 | CTTCAATGCT CGGTTTGCTT ATGGCCATAC CGACAATACT |

ATGACCACAA

| | |
|---|---|
| 551 | AGTACACTGG CTATTCTCCT GTTAAGGGAA GCTGGGGAAA |

TGATGCCTTC

| | |
|---|---|
| 601 | GGTATAGAAT GTCGAGGAGC TATCCCGGTA GTTGCTTCAG |

GACGTCGGTC

| | |
|---|---|
| 651 | TTGGGTGGAT ACCCACACGC CATTTCTAAA CCTAGAGATG |

ATCTATGCAC

| | |
|---|---|
| 701 | ATCAGAATGA CTTTAAGGAA AACGGCACAG AAGGCCGTTC |

TTTCCAAAGT

| | |
|---|---|
| 751 | GAAGACCTCT TCAATCTAGC GGTTCCTGTA GGGATAAAAT |

TTGAGAAATT

| | |
|---|---|
| 801 | CTCCGATAAG TCTACGTATG ATCTCTCCAT AGCTTACGTT |

CCCGATGTGA

| | |
|---|---|
| 851 | TTCGTAATGA TCCAGGCTGC ACGACAACTC TTATGGTTTC |

TGGGGATTCT

| | |
|---|---|
| 901 | TGGTCGACAT GTGGTACAAG CTTGTCTAGA CAAGCTCTTC |

TTGTACGTGC

| | |
|---|---|
| 951 | TGGAAATCAT CATGCCTTTG CTTCAAACTT TGAAGTTTTC |

AGTCAGTTTG

| | |
|---|---|
| 1001 | AAGTCGAGTT GCGAGGTTCT TCTCGTAGCT ATGCTATCGA |

TCTTGGAGGA

| | |
|---|---|
| 1051 | AGATTCGGAT TTTAA |

[0358] This sequence is frame-shifted with respect to cp0016.

[0359] The PSORT algorithm predicts a cytoplasmic location (0.075).

[0360] The protein was expressed in E. coli and purified as a GST-fusion product, as shown in FIG. 8A. The recombinant protein was used to immunise mice, whose sera were used in a Western blot (FIG. 8B) and for FACS analysis (FIG. 8C). A his-tagged protein was also expressed.

[0361] This protein also showed good cross-reactivity with human sera, including sera from patients with pneumonitis.

[0362] These experiments show that cp0017 is a surface-exposed and immunoaccessible protein, and that it is a useful immunogen. These properties are not evident from the sequence alone.

### Example 9

[0363] The following C. pneumoniae protein (PID 6172315) was expressed <SEQ ID 17; cp0014>:

| | |
|---|---|
| 1 | MKSSFPKFVF STFAIFPLSM IATETVLDSS ASFDGNKNGN |

FSVRESQEDA

| | |
|---|---|
| 51 | GTTYLFKGNV TLENIFGTGT AITKSCFNNT KGDLTFTGNG |

NSLLFQTVDA

| | |
|---|---|
| 101 | GTVAGAAVNS SVVDKSTTFI GFSSLSFIAS PGSSITTGKG |

AVSCSTGSLS

| | |
|---|---|
| 151 | LTKMSVCSSA KTFQRIMAVL SPQKLFH* |

[0364] The cp0014 nucleotide sequence <SEQ ID 18> is:

| | |
|---|---|
| 1 | ATGAAGTCTT CTPTCCCCAA GTTTGTATTT TCTACATTTG |

CTATTTTCCC

| | |
|---|---|
| 51 | TTTGTCTATG ATTGCTACCG AGACAGTTTT GGATTCAAGT |

GCGAGTTUCG

| | |
|---|---|
| 101 | ATGGGAATAA AAATGGTAAT TTTTCAGTTC GTGAGAGTCA |

GGAAGATGCT

| | |
|---|---|
| 151 | GGAACTACCT ACCTATTTAA GGGAAATGTC ACTCTAGAAA |

ATATTCCTGG

| | |
|---|---|
| 201 | AACAGGCACA GCAATCACAA AAAGCTGTTT TAACAACACT |

AAGGGCGATT

| | |
|---|---|
| 251 | TGACTTTCAC AGGTAACGGG AACTCTCTAT TGTTCCAAAC |

GGTGGATGCA

| | |
|---|---|
| 301 | GGGACTGTAG CAGGGGCTGC TGTTAACAGC AGCGTGGTAG |

ATAAATCTAC

| | |
|---|---|
| 351 | CACGTTTATA GGGTTTTCTT CGCTATCTTT TATTGCGTCT |

CCTGGAAGTT

| | |
|---|---|
| 401 | CGATAACTAC CGGCAAAGGA GCCGTTAGCT GCTCTACGGG |

TAGCTTGAGT

| | |
|---|---|
| 451 | TTGACAAAAA TGTCAGTTTG CTCTTCAGCA AAAACTTTTC |

AACGGATAAT

| | |
|---|---|
| 501 | GGCGGTGCTA TCACCGCAAA AACTCTTTCA TTAA |

[0365] This protein is frame-shifted with respect to cp0015.

[0366] The PSORT algorithm predicts an inner membrane location (0.047). The protein was expressed in E. coli and purified as a his-tag product, as shown in FIG. 9A. A GST-fusion was also expressed. The recombinant proteins were used to immunise mice, whose sera were used in an immunoassay (FIG. 9B) and for FACS analysis (FIG. 9C).

[0367] This protein also showed good cross-reactivity with human sera, including sera from patients with pneumonitis.

[0368] These experiments suggest that cp0014 is a useful immunogen. These properties are not evident from the sequence alone.

### Example 10

[0369] The following C. pneumoniae protein (PID 6172317) was expressed <SEQ ID 19; cp0015>:

| | |
|---|---|
| 1 | MSALFSENTS SKKGGAIQTS DALTITGNQG EVSFSDNTSS DSGAAIFTEA |
| 51 | SVTISNNAKV SFIDNKVTGA SSSTTGDMSG GAICAYKTST DTKVTLTGNQ |
| 101 | NLLFSNNTST TAGGAIYVKK LBLASGGLTL FSRNSVNGGT APKGGAIAIE |
| 151 | DSGELSLSAD SGDIVFLGNT VTSTTPGTNR SSIDLGTSAK MTALRSAAGR |
| 201 | AIYFYDPITT GSSTTVTDVL KVNETPADSA LQYTGNIIPT GEKLSETEAA |
| 251 | DSKNLTSKLL QPVTLSGGTL SLKHGVTLQT QAFTQQADSR LEMDVGTTLE |
| 301 | PADTSTINNL VINISSIDGA KKAKIETKAT SKNLTLSGTI TLLDPTGTFY |
| 351 | ENHSLRNPQS YDILELKASG TVTSTAVTPD PIMGEKFHYG YQGTWGPIVW |
| 401 | GTGASTTATF NWTKTGYIPN PERIGSLVPN SLWNAFIDIS SLHYLMETAN |
| 451 | EGLQGDRAFW CAGLSNFFHK DSTITRRGFR HLSGGYVIGG NLHTCSDKIL |
| 501 | SAAFCQLFGR DRDYFVAKWQ GTVYGGTLYY QHNETYISLP CRLRPCSLSY |
| 551 | VPTEIPVLFS GNLSYTHTDN DLKTKYTTYP TVKGSWGNDS PALEPGGRAP |
| 601 | ICLDESALFE QYNPFMKLQF VYAHQEGFKE QGTEAREFGS SRLVNLALPI |
| 651 | GIRFDKESDC QDATYNLTLG YTVDLVRSNP DCTTTLRISG DSWKTFGTNL |
| 701 | ARQALVLRAG NHFCFNSNFE AFSQFSFELR GSSRNYNVDL GAKYQF* |

[0370] This sequence is frame-shifted with respect to cp0014.

[0371] The cp0015 nucleotide sequence <SEQ ID 20> is:

| | |
|---|---|
| 1 | ATCTCAGCTC TGTTTTCTGA AAATACCTCC TCAAAGAAAG GCGGAGCCAT |
| 51 | TCAGACTTCC GATGCCCTTA CCATTACTGG AAACCAAGGG GAAGTCTCTT |
| 101 | TTTCTGACAA TACTTCTTCG GATTCTGGAG CTGCAATTTT TACAGAAGCC |
| 151 | TCGGTGACTA TTTTCTAAAA TGCTAAAGTT TCCTTTATTG ACAATAAGGT |
| 201 | CACAGGAGCG AGCTCCTCAA CAACGGGGGA TATGTGAGGA GGTGCTATCT |
| 251 | GTGCTTATAA AACTAGTACA GATACTAAGG TCACCCTCAC TGGAAATCAG |
| 301 | ATGTTACTCT TCAGCAACAA TACATCGACA ACAGCGGGAG GAGCTATCTA |
| 351 | TGTGAAAAAG CTCGAACTGG CTTCCGGAGG ACTTACCCTA TTCAGTAGAA |
| 401 | ATAGTGTCAA TGGAGGTACA GCTCCTAAAG GTGGAGCCAT AGCTATCGAA |
| 451 | GATAGTGGGG AATTGAGTTT ATCCGCCGAT AGTGGTGACA TTGTCTTTTT |
| 501 | AGGGAATACA GTCACTTCTA CTACTCCTGG GACGAATAGA AGTAGTATCG |
| 551 | ACTTAGGAAC GAGTGCAAAG ATGACAGCTT TGCGTTCTGC TGCTGGTAGA |
| 601 | GCCATCTACT TCTATGATCC CATAACTACA GGATCATCCA CAACAGTTAC |
| 651 | AGATGTCTTA AAAGTTAATG AGACTCCGGC AGATTCTGCA CTACAATATA |
| 701 | CAGGGAACAT CATCTTCACA GGAGAAAAGT TATCAGAGAC AGAGGCCGCA |
| 751 | GATTCTAAAA ATCTTACTTC GAAGCTACTA CAGCCTGTAA CTCTTTCAGG |
| 801 | AGGTACTCTA TCTTTAAAAC ATGGAGTGAC TCTGCAGACT CAGGCATTCA |
| 851 | CTCAACAGGC AGATTCTCGT CTCGAAATGG ACGTAGGAAC TACTCTAGAA |
| 901 | CCTGCTGATA CTAGCACCAT AAACAATTTG GTCATTAACA TCAGTTCTAT |
| 951 | AGACGGTGCA AAGAAGGCAA AAATAGAAAC CAAAGCTACG TCAAAAAATC |
| 1001 | TGACTTTATC TGGAACCATC ACTTTATTGG ACCCGACGGG CACGTTTTAT |
| 1051 | GAAAATCATA GTTTAAGAAA TCCTCAGTCC TACGACATCT TAGAGCTCAA |
| 1101 | AGCTTCTGGA ACTGTAACAA GCACCGCAGT GACTCCAGAT CCTATAATGG |
| 1151 | GTGAGAAATT CCATTACGGC TATCAGGGAA CTTGGGGCCC AATTGTTTGG |
| 1201 | GGGACAGGGG CTTCTACGAC TGCAACCTTC AACTGGACTA AAACTGGCTA |
| 1251 | TATTCCTAAT CCCGAGCGTA TCGGCTCTTT AGTCCCTAAT AGCTTATGGA |
| 1301 | ATGCATTTAT AGATATTAGC TCGCTCCATT ATCTTATGGA GACTGCAAAC |
| 1351 | GAAGGGTTGC AGGGAGACCG TGCTTTTTGG TGTGCTGGAT TATCTAACTT |
| 1401 | CTTCCATAAG GATAGTACAA AAACACGACG CGGGTTTCGC CATTTGAGTG |
| 1451 | GCGGTTATGT CATAGGAGGA AACCTACATA CTTGTTCAGA TAAGATTCTT |
| 1501 | AGTGCTGCAT TTTGTCAGCT CTTTGGAAGA GATAGAGACT ACTTTGTAGC |
| 1551 | TAAGAATCAA GGTACAGTCT ACGGAGGAAC TCTCTATTAC CAGCACAACG |
| 1601 | AAACCTATAT CTCTCTTCCT TGCAAACTAC GGCCTTGTTC GTTGTCTTAT |
| 1651 | GTTCCTACAG AGATTCCTGT TCTCTTTTCA GGAAACCTTA GCTACACCCA |
| 1701 | TACGGATAAC GATCTGAAAA CCAAGTATAC AACATATCCT ACTGTTAAAG |
| 1751 | GAAGCTGGGG GAATGATAGT TTCGCTTTAG AATTCGGTGG AAGAGCTCCG |
| 1801 | ATTTGCTTAG ATGAAAGTGC TCTATTTGAG CAGTACATGC CCTTCATGAA |
| 1851 | ATTGCAGTTT GTCTATGCAC ATCAGGAAGG TTTTAAAGAA CAGGGAACAG |
| 1901 | AAGCTCGTGA ATTTGGAAGT AGCCGTCTTG TGAATCTTGC CTTACCTATC |
| 1951 | GGGATCCGAT TTGATAAGGA ATCAGACTGC CAAGATGCAA CGTACAATCT |
| 2001 | AACTCTTGGT TATACTGTGG ATCTTGTTCG TAGTAACCCC GACTGTACGA |
| 2051 | CAACACTGCG AATTAGCGGT GATTCTTGGA AAACCTTCGG TACGAATTTG |
| 2101 | GCAAGACAAG CTTTAGTCCT TCGTGCAGGG AACCATTTTT GCTTTAACTC |
| 2151 | AAATTTTGAA GCCTTTAGCC AATTTTCTTT TGAATTGCGT GGGTCATCTC |
| 2201 | GCAATTACAA TGTAGACTTA GGAGCAAAAT ACCAATTCTA A |

[0372] The PSORT algorithm predicts a cytoplasmic location (0.274).

[0373] The protein was expressed in E. coli and purified as a GST-fusion product, as shown in FIG. 10A. The recombinant protein was used to immunise mice, whose sera were used in a Western blot (FIG. 10B) and for FACS analysis. A his-tagged protein was also expressed.

[0374] These experiments show that cp0015 is a useful immunogen. These properties are not evident from the sequence alone.

### Example 11

[0375] The following C. pneumoniae protein (PID 6172325) was expressed <SEQ ID 21; cp0019>:

| | |
|---|---|
| 1 | LQDSQDYSFV KLSPGAGGTI ITQDASQKPL EVAPSRPHYG YQGHWNVQVI |
| 51 | PGTGTQPSQA NLEWVRTGYL PNPERQGSLV PNSLWGSFVD QRAIQEINVN |
| 101 | SSQILCQERG VWGAGIANFL HRDKINEHGY RHSGVGYLVG VGTHAFSDAP |
| 151 | INAAPCQLFS RDKDYVVSKN HGTSYSGVVF LEDTLEFRSP QGPYTDSSSE |
| 201 | ACCNQVVTID MQLSYSHRNN DMKTKYTTYP EAQGSWANDV FGLEFGATTY |
| 251 | YYPNSTFLFD YYSPFLRLQC TYAHQEDFKE TGGEVRHFTS GDLFNLAVPI |
| 301 | GVKFERPSDC KRGSYELTLA YVPDVIRXDP KSTATLASGA TWSTHGNNLS |
| 351 | RQGLQLRLGN HCLINPGIEV FSHGAIEELG SSRNYNINLG GKYRF* |

[0376] This sequence is frame-shifted with respect to cp0018.

[0377] The cp0019 nucleotide sequence <SEQ ID 22> is:

| | |
|---|---|
| 1 | TTGCAAGACT CTCAAGACTA TAGCTTTGTA AAGTTATCTC CAGGAGCGGG |
| 51 | AGGGACTATA ATTACTCAAG ATGCTTCTCA GAAGCCTCTT GAAGTAGCTC |
| 101 | CTTCTAGACC ACATTATGGC TATCAAGGAC ATTGGAATGT GCAAGTCATC |
| 151 | CCAGGAACGG GAACTCAACC GAGCCAGGCA AATTTAGAAT GGGTGCGCAC |
| 201 | AGGATACCTT CCGAATCCCG AACGGCAAGG ATCTTTAGTT CCCAATAGCC |
| 251 | TGTGGGGTTC TTTTGTTGAT CAGCGTGCTA TCCAAGAAAT CATGGTAAAT |
| 301 | AGTAGCCAAA TCTTATGTCA GGAACGGGGA GTCTGGGGAG CTGGAATTGC |
| 351 | TAATTTCCTA CATAGAGATA AAATTAATGA GCACGGCTAT CGCCATAGCG |
| 401 | GTGTCGGTTA TCTTGTGGGA GTTGGCACTC ATGCTTTTTC TGATGCTACG |
| 451 | ATAAATGCGG CTTTTTGCCA GCTCTTCAGT AGAGATAAAG ACTACGTAGT |
| 501 | ATCCAAAAAT CATGGAACTA GCTACTCAGG GGTCGTATTT CTTGAGGATA |
| 551 | CCCTAGAGTT TAGAAGTCCA CAGGGATTCT ATACTGATAG CTCCTCAGAA |
| 601 | GCTTGCTGTA ACCAAGTCGT CACTATAGAT ATGCAGTTGT CTTACAGCCA |
| 651 | TAGAAATAAT GATATGAAAA CCAAATACAC GACATATCCA GAAGCTCAGG |
| 701 | GATCTTGGGC AAATGATGTT TTTGGTCTTG AGTTTGGAGC GACTACATAC |
| 751 | TACTACCCTA ACAGTACTTT TTTATTTGAT TACTACTCTC CGTTTCTCAG |
| 801 | GCTGCAGTGC ACCTATGCTC ACCAGGAAGA CTTCAAAGAG ACAGGAGGTG |
| 851 | AGGTTCGTCA CTTTACTAGC GGAGATCTTT TCAATTTAGC AGTTCCTATT |
| 901 | GGCGTGAAGT TTGAGAGATT TTCAGACTGT AAAAGGGGAT CTTATGAACT |
| 951 | TACCCTTGCT TATGTTCCTG ATGTGATTCG CAAAGATCCC AAGAGCACGG |
| 1001 | CAACATTGGC TAGTGGAGCT ACGTGGAGCA CCCACGGAAA CAATCTCTCC |
| 1051 | AGACAAGGAT TACAACTGCG TTTAGGGAAC CACTGTCTCA TAAATCCTGG |
| 1101 | AATTGAGGTG TTCAGTCACG GAGCTATTGA ATTGCGGGGA TCCTCTCGTA |
| 1151 | ATTATAACAT CAATCTCGGG GGTAAATACC GATTTTAA |

[0378] The PSORT algorithm predicts a cytoplasmic location (0.189).

[0379] The protein was expressed in E. coli and purified as a GST-fusion product, as shown in FIG. 11A. This protein was used to immunise mice, whose sera were used in a Western blot (FIG. 11B) and an immunoblot assay (FIG. 11C). A his-tagged protein was also expressed.

[0380] These experiments show that cp0019 is a useful immunogen. These properties are not evident from the sequence alone.

### Example 12

[0381] The following C. pneumoniae protein (PID 4376466) was expressed <SEQ ID 23; cp6466>:

| | |
|---|---|
| 1 | MRKISVGXCI TILLSLSVVL QGCKESSHSS TSRGELAINI RDEPRSLDPR |
| 51 | QVRLLSEISL VKRIYEGLVQ ENNLSGNIEP ALAEDYSLSS DGLTYTFKLK |
| 101 | SAPWSNGDPL TAEDFIBSWK QVATQEVSGI YAPALNPIKN VRXIQEGHLS |
| 151 | IDHFGVHSPN ESTLVVTLES PTSHPLKLLA LPVFFPVHKS QRTLQSKSLP |
| 201 | IASGAPYPKN IKQKQWIKLS KNPHYYNQSQ VETKTITIHF IPDANTAAKL |
| 251 | FNQGKLNWQG PPWGERIPQE TLSNLQSKGH LHSFDVAGTS WLTFNINKFP |
| 301 | LNNMKLRBAL ASALDKEALV STIFLGRAXT ADHLLPTNIH SYPEUQKQEH |
| 351 | AQRQAYAKKL PKEALEELQI TAKDLEHLNL IFPVSSSASB LLVQLIREQW |
| 401 | KESLGFAIPI VGKEFALLQA DLSSGNFSLA TGGWFADDAD PNAFLTIPAY |
| 451 | PSGVPPYAIN HKDFLEILQN IEQEQDHQKR SELVSQASLY LETFHIIEPI |
| 501 | YHDAFQFAMN KKLSNLGVSP TGVVDFRYAK EN* |

[0382] A predicted signal peptide is highlighted.

[0383] The cp6466 nucleotide sequence <SEQ ID 24> is:

| | |
|---|---|
| 1 | ATGCGCAAGA TATCAGTGGG AATCTGTATC ACCATTCTCC TTAGCCTCTC |
| 51 | CGTAGTCCTC CAAGGCTGCA AGGAGTCCAG TCACTCCTCT ACATCTCGGG |
| 101 | GAGAACTCGC TATTAATATA AGAGATGAAC CCCGTTCTTT AGATCCAAGA |
| 151 | CAAGTGCGAC TTCTTTCAGA AATCAGCCTT GTCAAACATA TCTATGAGGG |
| 201 | ATTAGTTCAA GAAAATAATC TTTQAGGAAA TATAGAGCCT GCTCTTGCAG |
| 251 | AAGACTACTC TCTTTCCTCG GACGGACTCA CTTATACTTT TAAACTGAAA |
| 301 | TCAGCTTTTT GGAGTAATGG CGACCCCTTA ACAGCTGAAG ACTTTATAGA |
| 351 | ATCTTGGAAA CAAGTAGCTA CTCAAGAAGT CTCAGGAATC TATGCTTTTG |
| 401 | CCTTGAATCC AATTAAAAAT GTACGAAAGA TCCAAGAGGG ACACCTCTCC |
| 451 | ATAGACCATT TTGGAGTGCA CTCTCCTAAT GAATCTACAC TTGTTGTTAC |
| 501 | CCTGGAATCC CCAACCTCGC ATTTCTTAAA ACTTTTAGCT CTTCCAGTCT |
| 551 | TTTTCCCCGT TCATAAATCT CAAAGAACCC TGCAATCCAA ATCTCTACCT |
| 601 | ATAGCAAGCG GAGCTTTCTA TCCTAAAAAT ATCAAACAAA AACAATGGAT |
| 651 | AAAACTCTCA AAAAACCCTC ACTACTATAA TCAAAGTCAG GTGGAAACTA |
| 701 | AAACGATTAC GATTCACTTC ATTCCCGATG CAAACACAGC AGCAAAACTA |
| 751 | TTTAATCAGG GAAAACTCAA TTGGCAAGGA CCTCCTTGGG GAGAACGCAT |
| 801 | TCCTCAAGAA ACCCTATCCA ATTTACAGTC TAAGGGGCAC TTACACTCTT |
| 851 | TTGATGTCGC AGGAACCTCA TGGCTCACCT TCAATATCAA TAAATTCCCC |
| 901 | CTCAACAATA TGAAGCTTAG AGAAGCCTTA GCATCAGCCT TAGATAAGGA |
| 951 | AGCTCTTGTC TCAACTATAT TCTTAGGCCG TGCAAAAACT GCCGATCATC |
| 1001 | TCCTACCTAC AAATATTCAT AGCTATCCCG AACATCAAAA ACAAGAGATG |
| 1051 | GCACAACGCC AAGCTTACGC TAAAAAACTC TTTAAAGAAG CTTTAGAAGA |
| 1101 | ACTCCAAATC ACTGCTAAAG ATCTCGAACA TCTTAATCTT ATCTTTCCCG |
| 1151 | TTTCCTCGTC AGCAAGTTCT TTACTAGTCC AACTTATACG AGAACAGTGG |
| 1201 | AAAGAAAGTT TAGGGTTCGC TATCCCTATT GTCGGAAAGG AATTTGCTCT |
| 1251 | TCTCCAAGCA GACCTATCTT CAGGGAACTT CTCTTTAGCT ACAGGAGGAT |
| 1301 | GGTTCGCAGA CTTTGCTGAT CCTATGGCAT TTCTAACGAT CTTTGCTTAT |
| 1351 | CCATCAGGAG TTCCTCCTTA TGCAATCAAC CATAAGGACT TCCTAGAAAT |
| 1401 | TCTACAAAAC ATAGAACAAG AGCAAGATCA CCAAAAACGC TCGGAATTAG |
| 1451 | TGTCGCAAGC TTCTCTTTAC CTAGAGACCT TTCATATTAT TGAGCCGATC |
| 1501 | TACCACGACG CATTTCAATT TGCTATGAAT AAAAAACTTT CTAATCTAGG |
| 1551 | AGTCTCACCA ACAGGAGTTG TGGACTTCCG TTATGCTAAG GAAAATTAG |

[0384] The PSORT algorithm predicts that the protein is an outer membrane lipoprotein (0.790).

[0385] The protein was expressed in E. coli and purified both as a GST-fusion product and a His-tag fusion product. Purification of the protein as a GST-fusion product is shown in FIG. 12A. The recombinant proteins were used to immunise mice, whose sera were used in Western blots (FIGS. 12B and 12C). FACS analysis was also performed.

[0386] These experiments show that cp6466 is a useful immunogen. These properties are not evident from the sequence alone.

### Example 13

[0387] The following C. pneumoniae protein (PID 4376468) was expressed <SEQ ID 25; cp6468>:

| | |
|---|---|
| 1 | MFSRWITLFL LFISLTGCSS YSSKHKQSLI IPIHDDPVAF SPEQAKRAND |
| 51 | LSIAQLLFDG LTRETHRESN DLELAIASRY TVSEDFCSYT FFIKDSALWS |
| 101 | DGTPITSEDI RNAWEYAQEN SPHIQIFQGL TWSTPSSNAI TIHLDSPNPD |
| 151 | FPKLLAPPAF AIFKPENPKL FSGPYTLVEY FPGHNIHLKK NPNYYDYHCV |
| 201 | SINSIKLLII PDIYTAIHLL NRGKVDWVGQ PWHQGIPWEL HKQSQYHYYT |
| 251 | YPVEGAPWLC LNTKSPHLND LQNRHRLATC IDKRSIIEEA LQGTQQPAET |
| 301 | LSRGAPQPNQ YKKQKPLTPQ EKLVLTYPSD ILRCQRIAEI LKEQWKAAGI |
| 351 | DLILEGLEYH LFVVNKRKQD YAIATQTGVA YYPGANLISE EDKLLQNFEI |
| 401 | IPIYYLSYDY LTQDFIEGVI YNASGAVDLK YTYFP* |

[0388] A predicted signal peptide is highlighted.

[0389] The cp6468 nucleotide sequence <SEQ ID 26> is:

| | |
|---|---|
| 1 | ATGTTTTCAC GATGGATCAC CCTCTTTTTA TTATTCATTA GCCTTACTGG |
| 51 | ATGCTCCTCC TACTCTTCAA AACATAAACA ATCTTTAATT ATTCCCATAC |
| 101 | ATGACGACCC TGTAGCTTTT TCTCCTGAAC AAGCAAAACG GGCCATCGAC |
| 151 | CTTTCTATTG CCCAACTTCT TTTTGATGGT CTGACTAGAG AAACTCATCG |
| 201 | CGAATCCAAT GATTTGGAAT TAGCGATTGC CAGTCGCTAT ACAGTCTCTG |
| 251 | AAGACTTTTG CTCTTATACG TTCTTTATCA AAGACAGCGC TTTATGGAGC |
| 301 | GACGGAACAC CAATCACCTC CGAAGATATC CGTAACGCTT GGGAGTATGC |
| 351 | ACAGGAGAAC TCTCCCCACA TACAGATCTT CCAAGGACTT AACTTCTCAA |
| 401 | CTCCTTCATC AAATGCAATT ACGATTCATC TCGACTCGCC CAACCCCGAT |
| 451 | TTTCCTAAGC TTCTTGCCTT TCCTGCATTT GCTATCTTTA AACCAGAAAA |
| 501 | CCCGAAGCTC TTTAGCGGTC CGTATACTCT TGTAGAGTAT TTCCCAGGGC |
| 551 | ATAACATTCA TTTAAAGAAA AACCCTAACT ATTACGACTA CCACTGCGTC |
| 601 | TCCATCAACT CCATCAAACT GCTCATTATT CCTGATATAT ATACAGCCAT |
| 651 | CCACCTCCTA AACAGAGGCA AGGTGGACTG GGTAGGACAA CCCTGGCATC |
| 701 | AAGGGATTCC TTGGGAGCTC CATAAACAAT CGCAATATCA CTACTACACC |
| 751 | TATCCTGTAG AAGGTGCCTT CTCGCTTTGT CTAAATACAA AATCCCCACA |
| 801 | CTTAAATGAT CTTCAAAACA GACATAGACT CGCTACTTGT ATTGATAAAC |
| 851 | GTTCTATCAT TGAAGAAGCT CTTCAAGGAA CCCAACAACC AGCGGAAACA |
| 901 | CTGTCCCGAG GAGCTCCACA ACCAAATCAA TATAAAAAAC AAAAGCCTCT |
| 951 | AACTCCACAA GAAAAACTCG TGCTTACCTA TCCCTCAGAT ATTCTAAGAT |
| 1001 | GCCAACGCAT AGCAGAAATC TTAAAGGAAC AATGGAAAGC TGCTGGAATA |
| 1051 | GATTTAATCC TTGAAGGACT CGAATACCAT CTGTTTGTTA ACAAACGAAA |
| 1101 | AGTCCAAGAC TACGCCATAG CAACACAGAC TGGAGTTGCT TATTACCCAG |
| 1151 | GAGCAAATCT AATTTCTGAA GAAGACAAGC TCCTGCAAAA CTTTGAGATT |
| 1201 | ATCCCGATCT ACTATCTGAG CTATGACTAT CTCACTCAAG ATTTTATAGA |
| 1251 | GGGAGTAATC TATAATGCTT CTCGAGCTGT AGATCTCAAA TATACCTATT |
| 1301 | TCCCCTAG |

[0390] The PSORT algorithm predicts that this protein is an outer membrane lipoprotein (0.790).

[0391] The protein was expressed in E. coli and purified as a GST-fusion product, as shown in FIG. 13A. The recombinant protein was used to immunise mice, whose sera were used in a Western blot (FIG. 13B) and for FACS analysis. A his-tagged protein was also expressed.

[0392] These experiments show that cp6468 is a useful immunogen. These properties are not evident from the sequence alone.

### Example 14

[0393] The following C. pneumoniae protein (PID 4376469) was expressed <SEQ ID 27; cp6469>:

| | |
|---|---|
| 1 | MKMHRLKPTL KSLIPNLLFL LLTLSSCSKQ KQEPLGKRLV IAMSHDLADL |
| 51 | DPRNAYLSRD ASLAKALYEG LTRETDQGIA LALAESYTLS KDRKVYTFKL |
| 101 | RPSVWSDGTP LTAYDFEKSI KQLYFEEFSP SIHTLLGVIK NSSAIHIAQK |
| 151 | SLETLGIQAK DDLTLVITLE QPFPYFLTLI ARPVFSPVHH TLRESYRKGT |
| 201 | PPSTYISNGP FVLKKHEHQN YLILEKNPHY YDHESVKLDR VTLKIIPDAS |
| 251 | TATKLFKSKS IDWIGSPWSA PISNEDQKVL SQEKILTYSV SSTTLLIYNL |
| 301 | QKPLIQNKAL RKAIAHAIDR KSILRLVPSG QEAVTINPPN LSQLNLQKEI |
| 351 | STEERQTKAR AYFQEAKETL SEKELAELSI LYPIDSSNSS IIAQEIQRQL |
| 401 | KDTLGLKIKI QGMEYHCFLK KRRQGDFFIA TGGWIAEYVS PVAPLSILGN |
| 451 | PEDLTQWRNS DYEKTLEKLY LPHAYKENLK KAEMIIEEET PIIPLYHGKY |
| 501 | IYAIHPKIQN TFGSLLGHTD LKNIDILS* |

[0394] A predicted signal peptide is highlighted.

[0395] The cp6469 nucleotide sequence <SEQ ID 28> is:

| | |
|---|---|
| 1 | ATGAAGATGC ATAQGCTTAA ACCTACCTTA AAAAGTCTGA TCCCTAATCT |
| 51 | TCTTTTCTTA TTGCTCACTC TTTCAAGCTG CTCAAAGCAA AAACAAGAAC |
| 101 | CCTTAGGAAA ACATCTCGTT ATTGCGATGA GCCATGATCT CGCCGACCTA |
| 151 | GATCCTCGCA ATCCCTATTT AAGCACAGAT GCTTCCCTAG CAAAAGCCCT |
| 201 | CTATGAAGCA CTGACAAGAG AAACTGATCA AGAAATCGCA CTGGCTCTTG |
| 251 | CAGAAAGTTA TACCCTGTCA AAAGATCATA AGGTCTATAC CTTTAAACTC |
| 301 | AGACCTTCTG TGTGGAGCGA TGGCACTCCA CTCACTGCTT ATGACTTTGA |
| 351 | AAAATCTATA AAACAACTGT ACTTCGAAGA ATTTTCACCT TCCATACATA |
| 401 | CTTTACTCGG CGTGATTAAA AATTCTTCGG CAATCCACAA TGCTCAAAAA |
| 451 | TCTCTGGAAA CTCTTGGGAT ACAGGCAAAA GATGATCTTA CTTTGGTGAT |
| 501 | TACCCTAGAG CAACCTTTCC CATACTTTCT CACACTTATC GCTCGCCCCG |
| 551 | TATTCTCCCC TGTTCATCAC ACCCTTAGGG AACTCCTTAA GAAAGGAACA |
| 601 | CCCCCATCCA CATACATCTC CAATGGGCCC TTTGTCTTAA AAAAACATGA |
| 651 | ACACCAAAAC TACTTAATTT TAGAAAAAAA TCCTCACTAC TATGATCATG |
| 701 | AATCAGTAAA GTTAGACCGA GTCACCTTAA AAATTATCCC AGACGCCTCC |
| 751 | ACAGCCACGA AACTTTTCAA AAGTAAATCT ATAGATTGGA TTGGCTCACC |
| 801 | TTGGAGCGCT CCGATATCTA ACGAAGACCA AAAAGTTCTC TCCCAAGAAA |
| 851 | AGATTCTTAC CTATTCTGTT TCAAGCACCA CCCTTCTTAT CTATAACCTG |
| 901 | CAAAAACCTC TAATACAAAA TAAAGCCCTC AGGAAAGCCA TTGCTCATGC |
| 951 | TATTGATAGA AAATCTATCT TAAGACTCGT GCCTTCAGGA CAAGAAGCTG |
| 1001 | TAACTCTAGT TCCCCCAAAT CTTTCACAAC TCAATCTTCA AAAAGAGATC |
| 1051 | TCAACAGAAG AACGACAAAC AAAAGCCAGA GCATATTTTC AAGAAGCTAA |
| 1101 | AGAAACACTT TCTGAAAAAG AACTCGCAGA ACTCAGCATC CTCTATCCTA |
| 1151 | TAGATTCCTC GAATTCCTCC ATCATAGCTC AAGAAATCCA AAGACAACTT |
| 1201 | AAAGATACcT TAGGATTGAA AATCAAAATC CAAGGCATGG AGTACCACTG |
| 1251 | CTTTTTAAAG AAACGTCGTC AAGGAGATTT CTTCATAGCG ACAGGAGGAT |
| 1301 | GGATTGCGGA ATACGTAAGC CCCGTAGCCT TCCTATCTAT TCTAGGCAAC |
| 1351 | CCCAGAGACC TCACACAATG GAGAAACAGT GATTACGAAA AGACTTTAGA |
| 1401 | GAAACTCTAT CTCCCTCATG CCTACAAAGA GAATTTAAAA CGCGCAGAAA |
| 1451 | TGATAATAGA AGAAGAAACC CCGATTATCC CCCTGTATCA CGGCAAATAT |
| 1501 | ATTTACGCTA TACATCCTAA AATCCAGAAT ACATTCGGAT CTCTTCTAGG |
| 1551 | CCACACAGAT CTCAAAAATA TCGATATCTT AAGTTAG |

[0396] The PSORT algorithm predicts a periplasmic location (0.934).

[0397] The protein was expressed in E. coli and purified as a GST-fusion product, as shown in FIG. 14A. The recombinant protein was used to immunise mice, whose sera were used in a Western blot (FIG. 14B) and for FACS analysis. A his-tagged protein was also expressed.

[0398] These experiments show that cp6469 is a useful immunogen. These properties are not evident from the sequence alone.

### Example 15

[0399] The following C. pneumoniae protein (PID 4376602) was expressed <SEQ ID 29; cp6602>:

| | |
|---|---|
| 1 | MAASGGTGGL GGTQGVNLAA VEAAAAKADA AEVVASQEGS EMNMIQQSQD |
| 51 | LTNPAAATRT KKKEEKFQTL ESRKKGEAGK AEKKSESTEE KPDTDLADKY |
| 101 | ASGNSEISGQ ELRGLRDAIG DDASPEDILA LVQEKIKDPA LQSTALDYLV |
| 151 | QTTPPSQGKL KEALIQARNT HTEQFGRTAI GAKNILFASQ EYADQLNVSP |
| 201 | SGLRSLYLEV TGDTHTCDQL LSMLQDRYTY QDMAIVSSFL MKGMATELKR |
| 251 | QGPYVPSAQL QVLMTETRNL QAVLTSYDYF ESRVPILLDS LKAEGIQTPS |
| 301 | DLNFVKVAES YHKIINDKFP TASKVEREVR NLIGDDVDSV TGVLNLFFSA |
| 351 | LRQTSSRLFS SADKRQQLGA MIANALDAVN INNEDYPKAS DFPKPYPWS* |

[0400] The cp6602 nucleotide sequence <SEQ ID 30> is:

| | |
|---|---|
| 1 | ATGGCAGCAT CAGGAGGCAC AGGTGGTTTA GGAGGCACTC AGGGTGTCAA |
| 51 | CCTTGCAGCT GTAGAAGCTG CAGCTGCAAA AGCAGATGCA GCAGAAGTTG |
| 101 | TAGCCAGCCA AGAAGGTTCT GAGATGAACA TGATTCAACA ATCTCAGGAC |
| 151 | CTGACAAATC CCGCAGCAGC AACACGCACG AAAAAAAAGG AAGAGAAGTT |
| 201 | TCAAACTCTA GAATCTCGGA AAAAAGGAGA AGCTGGAAAG GCTGAGAAAA |
| 251 | AATCTGAATC TACAGAAGAG AAGCCTGACA CAGATCTTGC TGATAAGTAT |
| 301 | GCTTCTGGGA ATTCTGAAAT CTCTGGTCAA GAACTTCGCG GCCTGCGTGA |
| 351 | TGCAATAGGA GACGATGCTT CTCCAGAAGA CATTCTTGCT CTTGTACAAG |

[0401]

| | |
|---|---|
| 401 | AGAAAATTAA AGACCCAGCT CTGCAATCCA CAGCTTTGGA CTACCTGGTT |
| 451 | CAAACGACTC CACCCTCCCA AGGTAAATTA AAAGAAGCGC TTATCCAAGC |
| 501 | AAGGAATACT CATACGGAGC AATTCGGACG AACTGCTATT GGTGCGAAAA |
| 551 | ACATCTTATT TGCCTCTCAA GAATATGCAG ACCAACTGAA TGTTTCTCCT |
| 601 | TCAGGGCTTC GCTCTTTGTA CTTAGAAGTG ACTGGAGACA CACATACCTG |
| 651 | TGATCAGCTA CTTTCTATGC TTCAAGACCG CTATACCTAC CAAGATATGG |
| 701 | CTATTGTCAG CTCCTTTCTA ATGAAAGGAA TGGCAACAGA ATTAAAAAGG |
| 751 | CAGGGTCCCT ACGTACCCAG TGCGCAACTA CAAGTTCTCA TGACAGTAAC |
| 801 | TCGTAACCTG CAAGCAGTTC TTACCTCCTA CGATTACTTT GAAAGTCGCG |
| 851 | TTCCTATTTT ACTCGATAGC TTAAAAGCTG AGGGAATCCA AACTCCTTCT |
| 901 | GATCTAAACT TTGTGAAGGT AGCTGAGTCC TACCATAAAA TCATTAACGA |
| 951 | TAAGTTCCCA ACAGCATCTA AAGTAGAACG AGAAGTCCGC AATCTCATAG |
| 1001 | GAGACGATGT TGATTCTGTG ACCGGTGTCT TGAACTTATT CTTTTCTGCT |
| 1051 | TTACGTCAAA CGTCGTCACG CCTTTTCTCT TCAGGAGACA AACGTCAGCA |
| 1101 | ATTAGGAGCT ATGATTGCTA ATGCTTTAGA TGCTGTAAAT ATAAACAATG |
| 1151 | AAGATTATCC CAAAGCATCA GACTTCCCTA AACCCTATCC TTGGTCATGA |

[0402] The PSORT algorithm predicts a cytoplasmic location (0.080).

[0403] The protein was expressed in E. coli and purified as both a His-tag and a GST-fusion product, as shown in FIG. 15A. The recombinant proteins were used to immunise mice, whose sera were used in a Western blot (FIG. 15B) and for FACS analysis (FIG. 15C).

[0404] The cp6602 protein was also identified in the 2D-PAGE experiment (Cpn0324).

[0405] These experiments show that cp6602 is a surface-exposed and immunoaccessible protein, and that it is a useful immunogen. These properties are not evident from the sequence alone.

### Example 16

[0406] The following C. pneumoniae protein (PID 4376727) was expressed <SEQ ID 31; cp6727>:

| | |
|---|---|
| 1 | MKYSLPWLLTSSALVFSLHP LMAANTDLSS SDNYENGSSG SAAFTAKETS |
| 51 | DASGTTYTLT SDVSITNVSA ITPADKSCFT NTGGALSFVG ADHSLVLQTI |
| 101 | ALTHDGAAIN NTNTALSFSG FSSLLIDSAP ATGTSGGKGA ICVTNTEGGT |
| 151 | ATFTDNASVT LQKNTSEKDG AAVSAYSIDL AKTTTAALLD QNTSTKNGGA |
| 201 | LCSTANTTVQ GNSGTVTFSS NTATDKGGGI YSKBKDSTLD ANTGVVTFKS |
| 251 | NTAKTGGAWS SDDNLALTGN TQVLFQENKT TGSAAQANNP EGCGGAICCY |
| 301 | LATATDKTGL AISQNQENSF TSNTTTANGG AIYATKCTLD GNTTLTFDQN |
| 351 | TATAGCGGAI YTETEDFSLK GSTGTVTFST NTAKTGGALY SKGNSSLTGN |
| 401 | TNLLFSGWCA TGPSNSSANQ EGCGGAILAF IDSGSVSDKT GLSIANNQEV |
| 451 | SLTSNAATVS GGAIYATKCT LTGNGSLTFD GNTAGTSGGA IYTETEDFTL |
| 501 | TGSTGTVTFS TNTAKTGGAL YSKGNNSLSG NTNLLFSGNK ATGPSNSSAN |
| 551 | QEGCGGAILS FIESASVSTK KGLWIEDNEN VSLSGNTATV SGGAIYATKC |
| 601 | ALHGNTTLTF DGNTAETAGG AIYTETEDFT LTGSTGTVTF STNTAKTAGA |
| 651 | LHTKGNTSFT KNKALVFSGN SATATATTTT DQBGCGGAIL CNISESDIAT |
| 701 | KSLTLTENES LSFINNTAKR SGGGIYAPKC VIBGSESINF DGNTAETSGG |
| 751 | AIYSKNLSIT ANGPVSFTNN SGGKGQAIYI ADSGELSLEA IDGDITFSGN |
| 801 | RATEGTSTPN SIHLGAGAKI TKLAAAPGHT IYFYDPITME APASGGTIEE |
| 851 | LVINPVVKAI VPPPQPKNGP IASVPVVPVA PANPNTGTIV FSSGKLPSQD |
| 901 | ASIPANTTTI LNQKINLAGG NVVLKEGATL QVYSFTQQPD STVFMDAGTT |
| 951 | LETTTTNNTD GSIDLKNLSV NLDALDGKRM ITIAVNSTSG GLKISGDLKF |
| 1001 | HNNEGSFYDN PGLKANLNLP FLDLSSTSGT VNLDDFNPIP SSMAAPDYGY |
| 1051 | QGSWTLVPKV GAGGKVTLVA EWQALGYTPK PELRATLVPN SLWNAYVNIH |
| 1101 | SIQQEIATAM SDAPSHPGIW IGGIGNAPHO DRQKENAGFR LISRGYIVGG |
| 1151 | SMTTPQEYTF AVAFSQLFGK SKDYVVSDIK SQVYAGSLCA QSSYVIPLHS |
| 1201 | SLRRHVLSKV LPELPGETPL VLHGQVSYGR NHHNMTTKLA NNTQGKSDWD |
| 1251 | SHSFAVEVGG SLPVDLNYRY LTSYSPYVKL QVVSVNQKGF QEVAADPRIF |
| 1301 | DASHLVNVSI PMGLTFKHES AKPPSALLLT LGYAVDAYRD HPHCLTSLTN |
| 1351 | GTSWSTFATN LSRQAFFAEA SGHLKLLHGL DCFASGSCEL RSSSRSYNAN |
| 1401 | CGTRYSF* |

[0407] A predicted signal peptide is highlighted.

[0408] The cp6727 nucleotide sequence <SEQ ID 32> is:

| | |
|---|---|
| 1 | ATGAAATATT CTTTACCTTG GCTACTTACC TCTTCGGCTT TACTTTTCTC |
| 51 | CCTACATCCA CTAATGGCTG CTAACACGGA TCTCTCATCA TCCGATAACT |
| 101 | ATGAAAATGG TAGTAGTGGT AGCGCAGCAT TCACTGCCAA GGAAACTTCG |
| 151 | GATGCTTCAG GAACTACCTA CACTCTCACT AGCGATGTTT CTATTACGAA |
| 201 | TGTATCTGCA ATTACTCCTG CAGATAAAAG CTGTTTTACA AACACAGGAG |
| 251 | GAGCATTGAG TTTTGTTGGA GCTGATCACT CATTGGTTCT GCAAACCATA |
| 301 | GCGCTTACGC ATGATGGTGC TGCAATTAAC AATACCAACA CAGCTCTTTC |
| 351 | TTTCTCAGGA TTCTCGTCAC TCTTAATCGA CTCAGCTCCA GCAACAGGAA |
| 401 | CTTCGGGCGG CAAGGGTGCT ATTTGTGTGA CAAATACAGA GGGAGGTACT |
| 451 | GCGACTTTTA CTGACAATGC CAGTGTCACC CTCCAAAAAA ATACTTCAGA |
| 501 | AAAAGATGGA GCTGCAGTTT CTGCCTACAG CATCGATCTT GCTAAGACTA |
| 551 | CGACAGCAGC TCTCTTAGAT CAAAATACTA GCACAAAAAA TGGCGGGGCC |
| 601 | CTCTGTAGTA CAGCAAACAC TACAGTCCAA GGAAACTCAG GAACGGTGAC |
| 651 | CTTCTCCTCA AATACTGCTA CAGATAAAGG TGGGGGGATC TACTCAAAAG |
| 701 | AAAAGGATAG CACCCTAGAT GCCAATACAG GAGTCGTTAC CTTCAAATCT |
| 751 | AATACTGCAA AGACGGGGGG TGCTTGGAGC TCTGATGACA ATCTTGCTCT |
| 801 | TACCGGCAAC ACTCAAGTAC TTTTTCAGGA AAATAAAACA ACCGGCTCAG |
| 851 | CAGCACAGGC AAATAACCCG GAAGGTTGTG GTGGGGCAAT CTGTTGTTAT |
| 901 | CTTGCTACAG CAACAGACAA AACTGGATTA GCCATTTCTC AGAATCAAGA |
| 951 | AATGAGCTTC ACTAGTAATA CAACAACTGC GAATGGTGGA GCGATCTACG |
| 1001 | CTACTAAATG TACTCTGGAT GGAAACACAA CTCTTACCTT CGATCAGAAT |
| 1051 | ACTGCGACAG CAGGATGTGG CGGAGCTATC TATACAGAAA CTGAACATTT |
| 1101 | TTCTCTTAAG GGAAGTACGG GAACCGTGAC CTTCAGCACA AATACAGCAA |
| 1151 | AGACAGGCGG CGCCTTATAT TCTAAAGGAA ACAGCTCGCT GACTGGAAAT |
| 1201 | ACCAACCTGC TCTTTTCAGG GAACAAAGCT ACGGGCCCGA GTAATTCTTC |
| 1251 | AGCAAATCAA GAGGGTTGCG GTGGGGCAAT CCTAGCCTTT ATTGATTCAG |
| 1301 | GATCCGTAAG CGATAAAACA GGACTATCGA TTGCAAACAA CCAAGATGTC |
| 1351 | AGCCTCACTA GTAATGCTGC AACAGTAAGT GGTGGTGCGA TCTATGCTAG |
| 1401 | CAAATGTACT CTAACTGGAA ACGGCTCCCT GACCTTTGAC GGCAATTCTG |
| 1451 | CTGGAACTTC AGGAGGGGCG ATCTATACAG AAACTGAAGA TTTTACTCTT |
| 1501 | ACAGGAAGTA CAGGAACCGT GACCTTCAGC ACAAATACAG CAAAGACAGG |
| 1551 | CGGCGCCTTA TATTCTAAAG GCAACAACTC TCTGTCTGGT AATACCAACC |
| 1601 | TGCTCTTTTC AGGGAACAAA GCTACGGGCC CGAGTAATTC TTCAGCAAAT |
| 1651 | CAAGAGGGTT GCGGTGGGGC AATCCTATCG TTTCTTGAGT CAGCATCTGT |
| 1701 | AAGTACTAAA AAAGGACTCT GGATTGAAGA TAACGAAAAC GTGAGTCTCT |
| 1751 | CTGGTAATAC TGCAACAGTA AGTGGCGGTG CGATCTATGC GACCAAGTGT |
| 1801 | GCTCTGCATG GAAACACGAC TCTTACCTTT GATGGCAATA CTGCCGAAAC |
| 1851 | TGCAGGAGGA GCGATCTATA CAGAAACCGA AGATTTTACT CTTACGGGAA |
| 1901 | GTACGGGAAC CGTGACCTTC AGCACAAATA CAGCAAAGAC AGCAGGGGCT |
| 1951 | CTACATACTA AAGGAAATAC TTCCTTTACC AAAAATAAGG CTCTTGTATT |
| 2001 | TTCTGGAAAT TCAGCAACAG CAACAGCAAC AACAACTACA GATCAAGAAG |
| 2051 | GTTGTGGTGG AGCGATCCTC TGTAATATCT CAGAGTCTGA CATAGCTACA |
| 2101 | AAAAGCTTAA CTCTTACTGA AAATGAGAGT TTAAGTTTCA TTAACAATAC |
| 2151 | GGCAAAAAGA AGTGGTGGTG GTATTTATGC TCCTAAGTGT GTAATCTCAG |
| 2201 | GCAGTGAATC CATAAACTTT GATGGCAATA CTGCTGAAAC TTCGGGAGGA |
| 2251 | GCGATTTATT CGAAAAACCT TTCGATTACA GCTAACGGTC CTGTCTCCTT |
| 2301 | TACCAATAAT TCTGGAGGCA AGGGAGGCGC CATTTATATA GCCGATAGCG |
| 2351 | GAGAACTTTC CTTAGAGGCT ATTGATGGGG ATATTACTTT CTCAGGGAAC |
| 2401 | CGAGCGACTG AGGGAACTTC AACTCCCAAC TCGATCCATT TAGGAGCAGG |
| 2451 | GGCTAAGATC ACTAAGCTTG CAGCAGCTCC TGGTCATACG ATTTATTTTT |
| 2501 | ATGATCCTAT TACGATGGAA GCTCCTGCAT CTGGAGGAAC AATAGAGGAG |
| 2551 | TTAGTCATCA ATCCTGTTGT CAAAGCTATT GTTCCTCCTC CCCAACCAAA |
| 2601 | AAATGGTCCT ATAGGTTGAG TGCCTGTAGT CCCTGTAGCA CCTGCAAACC |
| 2651 | CAAACACGGG AACTTTAGTA TTTTCTTCTG GAAAACTCCC CAGTCAAGAT |
| 2701 | GCCTCGATTC CTGCAAATAC TACCACCATA CTGAACCAGA AGATCAACTT |
| 2751 | AGCAGGAGGA AATGTCGTTT TAAAAGAAGG AGCCACCCTA CAAGTATATT |
| 2801 | CCTTCACACA GCAGCCTGAT TCTACAGTAT TCATGGATGC AGGAACGACC |
| 2851 | TTAGAGACCA CGACAACTAA CAATACAGAT GGCAGCATCG ATCTAAAGAA |
| 2901 | TCTCTCTGTA AATCTGGATG CTTTAGATGG CAAGCGTATG ATAACGATTG |
| 2951 | CCGTAAACAG CACAAGTGGG GGATTAAAAA TCTCAGGGGA TCTGAAATTC |
| 3001 | CATAACAATG MGGAAGTTTT CTATGACAAT CCTGGGTTGA AAGCAAACTT |
| 3051 | AAATCTTCCT TTCTTAGATC TTTCTTCTAC TTCAGGAACT GTAAATTTAG |
| 3101 | ACGACTTCAA TCCGATTCCT TCTAGCATGC CTGCTCCGGA TTATGGGTAT |
| 3151 | CAAGGGAGTT GGACTCTGGT TCCTAAAGTA GGAGCTGGAG GGAAGGTGAC |
| 3201 | TTTGGTCGCG GAATGGCAAG CGTTAGGATA CACTCCTAAA CCAGAGCTTC |
| 3251 | GTGCGACTTT AGTTCCTAAT ACCCTTTGGA ATGCTTATGT AAACATCCAT |
| 3301 | TCTATACAGC AGGAGATCGC CACTGCGATG TCGGACGCTC CCTCACATCC |
| 3351 | AGGGATTTGG ATTGGAGGTA TTGGCAACGC CTTCCATCAA GACAATCAAA |
| 3401 | AGGAAAATGC AGGATTCCGT TTGATTTCCA GAGGTTATAT TCTTGGTGGC |
| 3451 | AGCATGACCA CCCCTCAAGA ATATACCTTT GCTGTTACAT TCAGCCAACT |
| 3501 | CTTTGGCAAA TCTAAGGATT ACGTAGTCTC GGATATTAAA TCTCAAATCT |
| 3551 | ATGCAGGATC TCTCTATGCT CAGAGCTCTT AAGTCATTCC CCTGCATAGC |
| 3601 | TCATTACGTC GCCACGTCCT CTCTAAGGTC CTTCCAGAGC TCCCAGGAGA |
| 3651 | AACTCCCCTT GTTCTCCATG GTCAAGTTTC CTATGGAAGA AACCACCATA |
| 3701 | ATATGACGAC AAAGCTTGCG AACAACACAC AAGGGAAATC AGACTGGGAC |
| 3751 | AGCCATAGCT TCGCTGTTGA AGTCGGTGGT TCTCTTCCTG TAGATCTAAA |
| 3801 | CTACAGATAC CTTACCAGCT ACTCTCCCTA TGTGAAACTC CAAGTTGTAA |
| 3851 | GTGTAAATCA AAAAGGATTC CAAGACGTTC CTGCTGATCC ACGTATCTTT |
| 3901 | GACGCTAGCC ATCTGGTCAA CGTGTCTATC CCTATGGGAC TCACCTTCAA |
| 3951 | ACACGAATCA GCAAAGCCCC CCAGTGCTTT GCTTCTTACT TTAGGTTACG |
| 4001 | CTGTAGAAGC TTACCGGGAT CACCCTCACT GCCTGACCTC CTTAACAAAT |
| 4051 | GGCACCTCGT GGTCTACGTT TGCTACTAAC TTATCACGAC AAGCTTTCTT |
| 4101 | TGCTGAGGCT TCTGGACATC TGAAGTAACT TCATGGTCTT GACTGCTTCG |
| 4151 | CTTCTGGAAG TTGTGAACTG CGCAGCTCCT CAAGAAGCTA TAATGCAAAC |
| 4201 | TGTGGAACTC GTTATTCTTT CTAA |

[0409] The PSORT algorithm predicts an outer membrane location (0.915).

[0410] The protein was expressed in E. coli and purified as a his-tag product, as shown in FIG. 16A. The recombinant protein was used to immunise mice, whose sera were used in a Western blot (FIG. 16B) and for FACS analysis (FIG. 16C). A GST-fusion protein was also expressed.

[0411] The cp6727 protein was also identified in the 2D-PAGE experiment (Cpn0444).

[0412] These experiments show that cp6727 is a surface-exposed and immunoaccessible protein, and that it is a useful immunogen. These properties are not evident from the sequence alone.

### Example 17

[0413] The following C. pneumoniae protein (PID 4376731) was expressed <SEQ ID 33; cp6731>:

| | |
|---|---|
| 1 | MKSSLHWFLISSSLALPLSLNFSAFAAVVE INLGPTNSFS GPGTTTPPAG |
| 51 | TTNADGTTYN LTGDVSITNA GSPTALTASC FKETTGNLSF QGIIGYQFLLQ |
| 101 | NIDAGANTCF TNTAANKLLS FSGFSYLSLI QTTNATTGTG AIKSTGACSI |
| 151 | QSNYSCYFGQ NFSNDNGGAL QGSSISLSLN PNLTPTAKNK TQKGGALYST |
| 201 | GGITINNTLN SASFSENTAA NNGGATTTNA SSFISSNKAI SFINNSVWAT |
| 251 | SATGGAIYCS STSAPKPVLT LSDNGELNPI GNTAITSGGA IYTDNLVLSS |
| 301 | GGPTLFIKNS AIPTAAPLGG AIAIADSGSL SLSALGGDIT FEGNTVVKGA |
| 351 | SSSQTTTRNS INIGNTNAKI VQLRASQGNT IYFYDPITTS ITAALSDALN |
| 401 | LNGPDLAGNP AYQGTIVFSG EKLSEAEAAE ADNLKSTIQQ PLTLAGGQLS |
| 451 | LKSGVTLVAK SFSQSPGSTI LMDAGTTLET ADGITITNLV LNVDSLKBTK |
| 501 | KATLKATQAS QTVTLSGSLS LVDPSGNVYI DVSTNNPQVF SCLTLTADDP |
| 551 | ANIHITDLAA DPLEKNPIHW GYQGNWALWT QEDTATKSKA ATLTWTKTGY |
| 601 | NPNPERRGTL VANTLWGSFV DVRSIQQLVA TKVRQSQETR GIWCEGISNF |
| 651 | FHKDSTKINK GFRHISAGYV VGATTTIASD NLITAAFCQL FGKDRDHFIN |
| 701 | KNXASAYAAS LHLQHIATLS SPSLLRYLPG SESEQPVLFD AQISYIYSKN |
| 751 | TMKTYYTQAP KGESSWYNWG CALELASSLP HTALSHEGLF HAYFPFIKVE |
| 801 | ASYIHQDSFK ERNTTLVRSF DSGDLINVSV PIGITFERFS RNERASYEAT |
| 851 | VIYVADVYRK NPDCTTALLI NNTSWKTTGT NLSRQAGIGR AGIFYAFSPN |
| 901 | LEVTSNLSME IRGSSRSYNA DLGGKFQF* |

[0414] A predicted signal peptide is highlighted.

[0415] The cp6731 nucleotide sequence <SEQ ID 34> is:

| | |
|---|---|
| 1 | ATGAAATCCT CTCTTCATTG GTTTTTAATC TCGTCATCTT TAGCACTTCC |
| 51 | CTTGTCACTA AATTTCTCTG CGTTTCCTGC TGTTGTTGAA ATCAATCTAG |
| 101 | GACCTACCAA TAGCTTCTCT GGACCAGGAA CCTAAACTCC TCCAGCCCAA |
| 151 | ACAACAATTG CAGATGGAAC TATCTATAAT CTAACAGGGG ATGTCTCAAT |
| 201 | CACCAATGCA GCATCTCCGA CAGCTCTAAC CGCTTCCTGC TTTAAAGAAA |
| 251 | CTACTGGGAA TCTTTCTTTC CAAGGCCACG GCTACCAATT TCTCCTACAA |
| 301 | AATATCGATG CGGCAGCGAA CTGTACCTTT ACCAATACAG CTGCAAACAA |
| 351 | GCTTCTCTCC TTTTCAGGAT TCTCCTATTT GTCACTAATA CAAACCACGA |
| 401 | ATGCTACCAC AGGAACAGGA GCCATCAAGT CCACAGGAGC TTGTTCTATT |
| 451 | CACTCGAACT ATAGTTGCTA CTTTGGCCAA AACTTTTCTA ATGACAATGG |
| 501 | AGGCGCCCTC CAAGGCAGCT CTATCAGTCT ATCGCTAAAC CCCAACCTAA |
| 551 | CGTTTGCCAA AAACAAAGCA ACGCAAAAAG GGGGTGCCCT CTATTCCACG |
| 601 | GGAGGGATTA CAATTAACAA TACGTTAAAC TCAGCATCAT TTTCTGAAAA |
| 651 | TACCCCGGCG AACAATGGCG GAGCCATTTA CACGGAAGCT AGCAGTTTTA |
| 701 | TTAGCAGCAA CAAAGCAATT AGCTTTATAA ACAATAGTGT GACCGCAACC |
| 751 | TCAGCTACAG GGGGAGCCAT TTACTGTAGT AGTACATCAG CCCCCAAACC |
| 801 | AGTCTTAACT CTATCAGACA ACGGGGAACT GATCTTTATA GGAAATACAG |
| 851 | CAATTACTAG TGGTGGGGCG ATTTATACTG ACAATCTAGT TCTTTCTTCT |
| 901 | GGAGGACCTA CGCTTTTTAA AAACAACTCT GCTATAGATA CTGCAGCTCC |
| 951 | CTTAGGAGGA GCAATTGCGA TTGCTGACTC TGGATCTTTG AGTCTTTCGG |
| 1001 | CTCTTGGTGG AGACATCACT TTTGAAGGAA ACACATTAGT CAAAGGAGCT |
| 1051 | TCTTCGAGTC AGACCACTAC CAGAAATTCT ATTAACATCG GAAACACCAA |
| 1101 | TGCTAAGATT GTACAGCTGC GAGCCTCTCA AGGCTATACT ATCTACTTCT |
| 1151 | ATGATCCTAT TACAACTAGC ATCACTGCAG CTCTCTCAGA TGCTCTAAAC |
| 1201 | TTAAATGGTC CTGACCTTGC AGGGAATCCT GCATATCAAG GAACCATCGT |
| 1251 | ATTTTCTGGA GAGAAGCTCT CGGAAGCAGA AGCTGCAGAA GCTGATAATC |
| 1301 | TCAAATCTAC AATTCAGCAA CCTCTAACTC TTGCGGGAGG GCAACTCTCT |
| 1351 | CTTATATCAG GACTCACTCT AGTTGCTATG TCCTTTTCGC AATCTCCGGG |
| 1401 | CTCTACCCTC CTCATGGATG CATGGTCCAC ATTAGAAACC GCTGATGGGA |
| 1451 | TCACTATCAA TAATCTTGTT CTCAATGTAG ATTCCTTAAA AGATACCAAG |
| 1501 | AAGGCTACGC TAAAAGCAAC ACAAGCAATT CAGACAGTCA CTTTATCTGG |
| 1551 | ATCGCTCTCT CTTGTAGATC CTTCTGGAAA TGTCTACGAA GATGTCTCTT |
| 1601 | GGAATAACCC TCAAGTCTTT TCTTGTCTCA CTCTTACTGC TGACGTCCCC |
| 1651 | GCGAATATTC ACATCACAGA CTTAGCTGCT GATCCCCTAG AAAAAAATCC |
| 1701 | TATCCATTGG GGATACCAAG GGAATTGGGC ATTATCTTGG CAAGAGGATA |
| 1751 | CTGCGACTAA ATCCAAAGCA GCGACTCTTA CCTGGACAAA AACAGGATAC |
| 1801 | AATCCGAATC CTGAGCGTCG TGGAACCTTA GTTGCTAACA CGCTATGGGG |
| 1851 | ATCCTTTGTT GATGTGCGCT CCATACAACA GCTTGTAGCC ACTAAAGTAC |
| 1901 | GCCAATCTCA AGAAACTCGC GGCATCTGGT GTGAAGGGAT CTCGAACTTC |
| 1951 | TTCCATAAAG ATAGCACGAA GATAAATAAA GGTTTTCGCC ACATAAGTGC |
| 2001 | AGGTTATGTT GTAGGAGCGA CTACAACATT AGCTTCTGAT AATCTTATCA |
| 2051 | CTGCAGCCTT CTGCCAATTA TTCGGGAAAG ATAGAGATCA CTPTATAAAT |
| 2101 | AAAAATAGAG CTTCTGCCTA TGCAGCTTCP CTCCATCTCC AGCATCTAGC |
| 2151 | GACCTTGTCT TCTCCAAGCT TGTTACGCTA CCTTCCTGGA TCTGAAAGTG |
| 2201 | AGCAGCCTGT CCTCTTTGAT GCTCAGATCA GCTATATCTA TAGTAAAAAT |
| 2251 | ACTATGAAAA CCTATTACAC CCAAGCACCA AAGGGAGAGA GCTCGTGGTA |
| 2301 | TAATGACGGT TGCGCTCTGG AACTTGCGAG CTCCCTACCA CACACTGCTT |
| 2351 | TAAGCCATGA GGGTCTCTTC CACGCGTATT TTCCTTTCAT CAAAGTAGAA |
| 2401 | GCTTCGTACA TACACCAAGA TAGCTTCAAA GAACGTAATA CTACCTTGGT |
| 2451 | ACGATCTTTC GATAGCGGTG ATTTAATTAA CGTCTCTGTG CCTATTGGAA |
| 2501 | TTACCTTCGA GAGATTCTCG AGAAACGAGC GTGCGTCTTA CGAAGCTACT |
| 2551 | GTCATCTACG TTGCCGATGT CTATCGTAAG AATCCTGACT GCACGACAGC |
| 2601 | TCTCCTAATC AACAATACCT CGTGGAAAAC TACAGGAACG AATCTCTCAA |
| 2651 | GATAAGCTGG TATCGGAAGA GCAGGGATCT TTTATGCCTT CTCTCCAAAT |
| 2701 | TTTGAGGTCA CAAGTAACCT ATCTATGGAA ATTCGTGGAT CTTCACGCAG |
| 2751 | CTACAATGCA GATCTTGGAG GTAAGTTCCA GTTCTAA |

[0416] The PSORT algorithm predicts an outer membrane location (0.926).

[0417] The protein was expressed in E. coli and purified as a his-tag product, as shown in FIG. 17A. A GST-fusion protein was also expressed. The recombinant proteins were used to immunise mice, whose sera were used in a Western blot (FIG. 17B; his-tag) and for FACS analysis (FIG. 17C; his-tag and GST-fusion).

[0418] The GST-fusion protein also showed good cross-reactivity with human sera, including sera from patients with pneumonitis. Less cross-reactivity was seen with the his-fusion.

| | |
|---|---|
| 1701 | TCTTTATGAT ATGGTGTCAT TACAAACTCC AGTAGCAATT CCTATCGCTG |
| 1751 | TTTTCAAAGG AGCAACCGTT ACTAAGACAG GATTTCCTGA TGGGGAGATT |
| 1801 | GCGACTCCAA GCCACTACGG CTACCAAGGA AAGTGGTCCT ACACATGGTC |
| 1851 | CCGTCCCCTG TTAATTCCAG CTCCTGATGG AGGATTTCCT GGAGGTCCCT |
| 1901 | CTCCTAGCGC AAATACTCTC TATGCTTTAT GGAATTCAGA CACTCTCGTG |
| 1951 | CGTTCTACCT ATATCTTAGA TCCCGAGCGT TACGGAGAAA TTGTCAGCAA |
| 2001 | CAGCTTATGG ATTTCCTTCT TAGGAAATCA GGCATTCTCT GATATTCTCC |
| 2051 | AAGATGTTCT TTTGATAGAT CATCCCGGGT TGTCCATAAC CGCGAAAGCT |
| 2101 | TTAGGAGCCT ATGTCGAACA CACACCAAGA CAAGGACATG AGGGCTTTTC |
| 2151 | AGGTCGCTAT GGAGGCTACC AAGCTGCGCT ATCTATGAAC TACACGGACC |
| 2201 | ACACTACGTT AGGACTTTCT TTCGGGCAGC TTTATGGAAA AACTAACGCC |
| 2251 | AACCCCTACG ATTCACGTTG CTCAGAACAA ATGTATTTAC TCTCGTTCTT |
| 2301 | TGGTCAATTC CCTTTCGTGA CTCAAAAGAG CGAGGCCTTA ATTTCCTGGA |
| 2351 | AAGCAGCTTA TGGTTATPCC AAAAATCACC TAAATACCAC CTACCTCAGA |
| 2401 | CCTGACAAAG CTCCAAAATC TCAAGGGCAA TGGCATAACA ATAGTTACTA |
| 2451 | TGTTCTTATT TCTGCAGAAC ATCCTTTCCT AAACTGGTGT CTTCTTACAA |
| 2501 | GACCTCTGGC TCAAGCTTGG GATCTTTCAT GTTTTATTTC CGCAGAATTC |
| 2551 | CTAGGTGGTT GGCAAAGTAA GTTCACAGAA ACTGGAGATC TGCAACGTAG |
| 2601 | CTTTAGTAGA GGTAAAGGGT ACAATGTTTC CCTACCGATA GGATGTTCTT |
| 2651 | CTCAATGGTT CACACCATTT AAGAAGGCTC CTTCTACACT GACCATCAAA |
| 2701 | CTTGCCTACA AGCCTGATAT CTATCGTGTC AACCCTCACA ATATTGTGAC |
| 2751 | TGTCGTCACA AACCAATATA GCACTTCGAT CTCATGAGCA AATCTACGCC |
| 2801 | GCCACGGTTT GTTTGTACAT ATCCATGATG TATTAGATCT CACCGAGGAC |
| 2851 | ACTCAGGCCT TTCTAAACTA TACCTTTGAC GGGAAAAATG GATTTACAAA |
| 2901 | CCACCGAGTG TCTACAGGAC TAAAATCCAC ATTTTAA |

[0419] The PSORT algorithm predicts an outer membrane location (0.940).

[0420] The protein was expressed in E. coli and purified as a GST-fusion product, as shown in FIG. 18A. The recombinant protein was used to immunise mice, whose sera were used in an immunoblot analysis blot (FIG. 18B) and for FACS analysis (FIG. 18C). A his-tagged protein was also expressed.

[0421] The cp6737 protein was also identified in the 2D-PAGE experiment (Cpn0454) and showed good cross-reactivity with human sera, including sera from patients with pneumonitis.

[0422] These experiments show that cp6737 is a surface-exposed and immunoaccessible protein, and that it is a useful immunogen. These properties are not evident from the sequence alone.

### Example 19

[0423] The following C. pneumoniae protein (PID 4377090) was expressed <SEQ ID 37; cp7090>:

| | |
|---|---|
| 1 | MNIHSLWKLCTLLALLALPACSLSPNYGWE DSCNTCHHTR RKKPSSFGFV |
| 51 | PLYTEEDFNP NFTFGEYDSK EEKQYKSSQV AAFRNITFAT DSYTIKGEEN |
| 101 | LAILTNLVHY MKKNPKATLY IEGHTDERGA ASYNLALGAR RANAIKEHLR |
| 151 | KQGISADRLS TISYGKERPL NSGHNELAWQ QNFRTEFKIH AR* |

[0424] A predicted signal peptide is highlighted.

[0425] The cp7090 nucleotide sequence <SEQ ID 38> is:

| | |
|---|---|
| 1 | ATGAATATAC ATTCCCTATG GAAACTTTGT ACTTTATTGG CTTTACTTGC |
| 51 | ATTGCCAGCA TGTAGCCTTT CCCCTAATTA TGGCTGGGAG GATTCCTGTA |
| 101 | ATACATGCCA TCATACATGA CGAAAAAAGC CTTCTTCTTT TGGCTTTGTT |
| 151 | CCTCTCTATA CCGAAGAGGA CTTTTACCCT AATTTTACCT TCGGTGAGTA |
| 201 | TGATTCCAAA GAAGAAAAAC TATACAAGTC AAGCCAAGTT GCAGCATTTC |
| 251 | GTAATATCAC CTTTGCTACA GACAGCTATA CAATTTAAGG TGAAGTGAAC |
| 301 | CTTGCGATTC TCACGAACTT GGTTCACTAC ATGAAGAAAA ACCCGAAAGC |
| 351 | TACACTGTAC ATTGAAGGGC ATACTGACGA GCGTGGAGCA GCATCCTATA |
| 401 | ACCTTGCTTT AGGAGCACGA CGAGCCAATG CGATTAAAGA GCATCTCCGA |
| 451 | AAGCAGGGAA TCTCTGCAGA TCGTCTATCT ACTATTTCCT ACGGAAAAGA |
| 501 | ACATCCTTTA AATTCGGGAC ACAACGAACT AGCATGGCAA CAAAATCGCC |
| 551 | GTACAGAGTT TAAGATTCAT GCACGCTAA |

[0426] The PSORT algorithm predicts an outer membrane location (0.790).

[0427] The protein was expressed in E. coli and purified as a GST-fusion product, as shown in FIG. 19A. A his-tagged protein was also expressed. The recombinant proteins were used to immunise mice, whose sera were used in a Western blot FIG. 19B) and for FACS analysis.

[0428] These experiments show that cp7090 is useful immunogen. These properties are not evident from the sequence alone.

### Example 20

[0429] The following C. pneumoniae protein (PID 4377091) was expressed <SEQ ID 39; cp7091>:

| | |
|---|---|
| 1 | MLRQLCFQVF FFCFASLVYA EELEVVVRSE HITLPIEVSC QTDTKDPKIQ |
| 51 | KYLSSLTEIF CKDIALGDCL QPTAASKESS SPLAISLRLH VPQLSVVLLQ |
| 101 | SSKTPQTLCS FTISQNLSVD RQKIHHAADT VHYALTGIPG ISAGKIVFAL |
| 151 | SSLGKDQKLK QGEIMTTDYD GKNLAPLTTE CSLSITPKWV GVGSNPPYLY |
| 201 | VSYKYGVPKI FLGSLENTEG KKVLPLKGNQ LMPTFSPRKK LLAFVADTYG |
| 251 | NPDLFIQPFS LTSGPMGRPR RLLNENPGTQ GNPSFNPEGS QLVFISNKDG |
| 301 | RPRLYIMSLD PEPQAPRLLT KKYRNSSCPA WSPDGKKIAF CSVIKGVRQI |
| 351 | CIYDLSSGED YQLTTSPTNK ESPSWAIDSR HLVFSAGNAB ESELYLISLV |
| 401 | TKKTNKIAIG VGEKRFPSWG AFPQQPXKRT L* |

[0430] A predicted signal peptide is highlighted.

[0431] The cp7091 nucleotide sequence <SEQ ID 40> is:

| | |
|---|---|
| 1 | ATGTTACGGC AACTATGCTT CCAAGTTTTT TTCTTTTGCT TCGCATCGCT |
| 51 | AGTCTATGCT GAAGAATTAG AAGTTGTTGT CCGTTCCGAA CATATCACGC |
| 101 | TCCCTATTGA GGTCTCTTGC CAGACCGATA CGAAAGATCC AAAAATACAG |
| 151 | AAATACCTCA GCTCGCTAAC GGAGATATTT TGCAAGQACA TTGCCCTAGG |
| 201 | AGATTGTCTA CAACCCACAG CGGCTTCTAA AGAATCGTCA TCTCCTTTAG |
| 251 | CAATATCTTT ACGGTTGCAT GTACCTCAGC TATCTGTAGT GCTTTTACAG |
| 301 | TCTTCAAAAA CTCCTCAAAC CTTATGTTCT TTTACTATTT CTCAAAATCT |
| 351 | TTCTGTAGAT CGTCAAAAAA TCCATCACGC TGCTGATACA GTTCATTACG |
| 401 | CCCTCACAGG GATTCCTGGA ATCAGTGCTG GGAAAATTGT TTTTGCTCTA |
| 451 | AGTTCTTTAG GAAAAGATCA AAAGCTCAAG CAAGGAGAAT TATGGACTAC |
| 501 | AGAATACGAT GGGAAAAACC TCGCCCCTTT AACCACAGAA TGTTCGCTCT |
| 551 | CTATAACTCC AAAATGGGTG GGTGTGGGAT CAAATTTTCC CTATCTCTAT |
| 601 | GTTTCGTATA ACTATGGTGT GCCTAAAATT TTTCTTGGTT CCCTAGAGAA |
| 651 | CACTGAAGGT AAAAAAGTCC TTCCGTTAAA AGGCAACCAA CTCATGCCTA |
| 701 | CGTTTTCTCC AAGAAAAAAG CTTTTAGCTT TCGTTGCTGA TACGTATGGA |
| 751 | AATCCTGATT TATTTATTCA ACCGTTCTCA CTAACTTCAG GACCTATGGG |
| 801 | TCGCCCACGT CGCCTCCTTA ATGAGAATTT CGGGACTCAA GGGAATCCCT |
| 851 | CCTTCAACCc TGAAGGATCC CAGCTTGTCT TTATATCGAA CAAAGACGGC |
| 901 | CGTCCGCGTC TTTATATTAT GTCCCTCGAT CCTGAACCCC AAGCACCTCG |
| 951 | CTTGCTGACA AAAAAATACA GAAATAGCAG TTGCCCTGCA TGGTCTCCAG |
| 1001 | ATGGTAAAAA AATAGCCTTC TGCTCTGTAA TTAAAGGGGT GCGACAAATT |
| 1051 | TGTATTTACG ATCTCTCCTC TGGAGAGGAT TACCAACTCA CTACGTCTCC |
| 1101 | CACAAATAAA GAGAGTCCTT CTTGGGCTAT AGACAGCCGT CATCTTGTCT |
| 1151 | TTAGTGCGGG GAATGCTGAA GAATCAGAGT TATATTTAAT CAGTCTAGTC |
| 1201 | ACCAAAAAAA CTAACAAAAT TGCTATAGGA GTAGGAGAAA AACCGTTCCC |
| 1251 | CTCCTGGGGT GCTTTCCCTC AGCAACCGAT AAAGAGAACA CTATGA |

[0432] The PSORT algorithm predicts an inner membrane location (0.109).

[0433] The protein was expressed in E. coli and purified as a GST-fusion product, as shown in FIG. 20A. A his-tagged protein was also expressed. The recombinant proteins were used to immunise mice, whose sera were used in a Western blot (FIG. 20B) and for FACS analysis.

[0434] These experiments show that cp6731 is a surface-exposed and immunoaccessible protein, and that it is a useful immunogen. These properties are not evident from the sequence alone.

### Example 18

[0435] The following C. pneumoniae protein (PID 4376737) was expressed <SEQ ID 35; cp6737>:

| | |
|---|---|
| 1 | MPLSFKSSSF CLLACLCSAS CAFAETRLGG NFVPPITNQG EEILLTSDFV |
| 51 | CSNFLGASFS SSPINSSSNL SLLGKGLSLT FTSCQAPTNS NYALLSAAET |
| 101 | LTFKNFSSIN FTGNQSTGLG GLIYGKDIVF QSIKDLIFTT NRVAYSPASV |
| 151 | TTSATPAITT VTTGASALQP TDSLTVENIS QSIKFFGNLA NFGSAISSSP |
| 201 | TAVVKFINNT ATMSFSHNFT SSGGGVIYGG SSLLFENNSG CIIFTANSCV |
| 251 | NSLKGVTPSS GTYALGSGGA ICIPTGTPEL KNNQGKCTFS YNGTPNDAGA |
| 301 | IYAETCNIVG NQGALLLDSN TAARNGGAIC AKVLNIQGRG PIEFSRNRAE |
| 351 | KGGAIFIGPS VGDPAKQTST LTILASEGDI AFQGNHLNTK PGIRNAITVE |
| 401 | AGGEIVSLSA QGGSRLVFYD PITHSLPTTS PSNKDITINA NGASGSVVFT |
| 451 | SKGLSSTELL LPANTTTILL GTVKIASGEL KITDNAVVNV LGFATQGSGQ |
| 501 | LTLGSGGTLG LATPTGAPAA VDFTIGKLAF DPPSFLKRDF VSASVNAGTK |
| 551 | NVTLTGALVL DEHDVTDLYD MVSLQTPVAI PIAVFKGATV TKTGFPDGEI |
| 601 | ATPSUYGYQG KWSYTWSRPL LIPAPDGGFP GGPSPSAWTL YAVWNSDTLV |
| 651 | RSTYILDPER YGEIVSNSLW ISPLGNQAFS DILQDVLLID HPGLSITAKA |
| 701 | LGAYVEHTPR QGHEGFSGRY GGYQAALSMN YTDHTTLGLS FGQLYGKTNA |
| 751 | NPYDSRCSEQ MYLLSFFGQF PIVTQKSEAL ISWKAAYGYS KNHLNTTYLR |
| 801 | PDKAPKSQGQ WHNNSYYVLI SAEHPFLNWC LLTRPLAQAW DLSGFISAEF |
| 851 | LGGWQSKFTE TGDLQRSFSR GKGYNVSLPI GCSSQWFTPF KNHLNTTYLR |
| 901 | LAYKPDIYRV NPHNIVTVVS NQESTSISGA NLRRHGLFVQ IHDVVDLTED |
| 951 | TQAFLNYTFD GKNGFTNHRV STGLKSTP* |

[0436] A predicted signal peptide is highlighted.

[0437] The cp6737 nucleotide sequence <SEQ ID 36> is:

| | |
|---|---|
| 1 | ATGCCTCTTT CTTTCAAATC TTCATCTTTT TGTCTACTTG CCTGTTTATG |
| 51 | TAGTGCAAGT TGCGCGTTTG CTGAGACTAG ACTCGGAGGG AACTTTGTTC |
| 101 | CTCCAATTAC GAATCAGGGT GAAGAGATCT TACTCACTTC AGATTTTGTT |
| 151 | TGTTCAAACT TCTTGGGGGC GAGTTTTTCA AGTTCCTTTA TCAATAGTTC |
| 201 | CAGCAATCTC TCCTTATTAG GGAAGGGCCT TTCCTTAACG TTTACCTCTT |
| 251 | GTCAAGCTCC TACAAATAGT AACTATGCGC TACTTTCTGC CGCAGAGACT |
| 301 | CTGACCTTCA AGAATTTTTC TTCTATAAAC TTTACAGGGA ACCAATCGAC |
| 351 | AGGACTTGGC GGCCTCATCT ACGGAAAAGA TATTGTTTTC CAATCTATCA |
| 401 | AAGATTTGAT CTTCACTACG AACCGTGTTG CCThTTCTCC AGCATCTGTA |
| 451 | ACTACGTCGG CAACTCCCGC AATCACTACA GTAACTACAG GTGCCTCTGC |
| 501 | TCTCCAACCT ACAGACTCAC TCACTGTCGA AAACATATCC CAATCGATCA |
| 551 | AGTTTTTTGG GAACCTTGCC AACTTCGGCT CTGCAATTAG CAGTTCTCCC |
| 601 | ACGGCAGTCG TTAAATTCAT CAATTACACC GCTACCATGA GCTTCTCCCA |
| 651 | TAACTTTACT TCGTCAGGAG GCGGCGTGAT TTATGGAGGA AGCTCTCTCC |
| 701 | TTTTTGAAAA CAATTCTGGA TGCATCATCT TCACCGCCAA CTCCTGTGTG |
| 751 | AACAGCTTAA AAGGCGTCAC CCCTTCATCA GGAACCTAGG CTTTAGGAAG |
| 801 | TGGCGGAGCC ATCTGCATCC CTACGGGAAC TTTCGAATTA AAAAACAATC |
| 851 | AGGGGAAGTG CACCTTCTCT TATAATGGTA CACCAAATGA TGCGGGTGCG |
| 901 | ATCTACGCCG AAACCTGCAA CATCGTAGGG AACCAGGGTG CCTTGCTCCT |
| 951 | AGATAGCAAC ACTGCAGCGA GAAATGGCGG AGCCATCTGT GCTAAAGTGC |
| 1001 | TCAATATTCA AGGACGCGGT CCTATTGAAT TCTCTAGAAA CCGCGCGGAG |
| 1051 | AAGGGTGGAG CTATTTTCAT AGGCCCCTCT GTTGGAGACC CTGCGAAGCA |
| 1101 | AACATCGACA CTTACGATTT TGGCTTCCGA AGGTGATATT GCGTTCCAAG |
| 1151 | GAAACATGCT CAATACAAAA CCTGGAATCC GCAATGCCAT CACTGTAGAA |
| 1201 | GCAGGGGGAG AGATTGTGTC TCTATCTGCA CAAGGAGGCT CACGTCTTGT |
| 1251 | ATTTTATGAT CCCATTACAC ATAGCCTCCC AACCACAAGT CCGTCTAATA |
| 1301 | AAGACATTAC AATCAACGCT AATGGCGCTT CAGGATCTGT AGTCTTTACA |
| 1351 | AGTAAGGGAC TCTCCTCTAC AGAACTCCTG TTGCCTGCCA ACACGACAAC |
| 1401 | TATACTTCTA GGAACAGTCA AGATCGCTAG TGGAGAACTG AAGATTACTG |
| 1451 | ACAATGCGGT TGTCAATGTT CTTGGCTTCG CTACTCAGGG CTCAGGTCAG |
| 1501 | CTTACCCTGG GCTCTGGAGG AACCTTAGGG CTGGCAACAC CCACGTGAGC |
| 1551 | ACCTGCCGCT GTAGACTTTA CGATTGGAAA GTTAGCATTC GATCCTTTTT |
| 1601 | CCTTCCTAAA AAGAGATTTT GTTTCAGCAT CAGTAAATGC AGGCACAAAA |
| 1651 | AACGTCACTT TAACAGGAGC TCTGGTTCTT GATGAACATG ACGTTACAGA |

[0438] These experiments show that cp7091 is a useful immunogen. These properties are not evident from the sequence alone.

### Example 21

[0439] The following C. pneumoniae protein (PID 4376260) was expressed <SEQ ID 41; cp6260>:

| | |
|---|---|
| 1 | MRFSLCGFPL VFSFTLLSVF DTSLSATTIS LTPEDSFHGD SQNAERSYNV |
| 51 | QAGDVYSLTG DVSISNVDNS ALNXACDNVT SGSVTFAGNH HGLYFNNISS |
| 101 | GTTKEGAVLC CQDPQATARF SGFSTLSFIQ SPGDIKEQGC LYSKNALMLL |
| 151 | NNYVVRFEQN QSKTRGGAIS GANVTIVCNY DSVSFYQNAA TPGGAIHSSG |
| 201 | PLQIAVNQAE IRFAQNTAXN GSGGALYSDG DIDIDQNAYV LFRENEALTT |
| 251 | AIGKGGAVCC LPPSGSSTPV PIVTFSDNKQ LVFERNHSIM GGGAIYAREL |
| 301 | SISSGGPTLF INNISYANSQ NLGGAIAIDT GGEISLSAEK GTITFQGNRT |
| 351 | SLPFLNGIHL LQNAXFLKLQ ARNGYSIEFY DPITSEADGS TQLNINGDPK |
| 401 | NKEYTGTILF SGEKSLANDP RDFKSTIPQN VNLSAGYLVI KEGABVTVSK |
| 451 | FTQSPGSXLV LDLGTKLIAS KEDIAITGLA IDIDSLSSSS TAAVIKANTA |
| 501 | NKQISVTDSI ELISPTGNAY EDLRMRNSQT FPLLSLEPGA GGSVTVTAGD |
| 551 | FLPVSPHYGF QGNWKLAWTG TGNKVGEFFW DKINYKPRPE KEGNLVPNIL |
| 601 | WGNAVDVRSL MQVQETHASS LQTDRGLWID GIGNFFHVSA SEDNIRYRHN |
| 651 | SGGYVLSVNN EITPKHYTSH AFSQLFSRDK DYAVSNNEYR NYLGSYLYQY |
| 701 | TTSLGNIFRY ASHRPNVNVG ILSRRFLQNP LMIFHFLCAY GRATNIMKTD |
| 751 | YANFPMVKNS WRNNCWAIEC GGSMPLLVFE NGRLPQGAIP FMRLQLVYAY |
| 801 | QGDEKBTTAD GRRFSNGSLT SISVPLGIRF EKLALSQDVL YDPSFSYIPD |
| 851 | IFRKDPSCEA ALVISGDSWL VPAAHVSPHA FVGSGTGRYH FNDYTSLLCR |
| 901 | GSIECRPRAR NYNINCGSKF RF* |

[0440] A predicted signal peptide is highlighted.

[0441] The cp6260 nucleotide sequence <SEQ ID 42> is:

| | |
|---|---|
| 1 | ATGCGATTTT CGCTCTGCGG ATTTCCTCTA GTTTTTTCTT TTACATTGCT |
| 51 | CTCAGTCTTC GACACTTCTT TGAGTGCTAC TACGATTTCT TTAACCCCAG |
| 101 | AAGATAGTTT TCATGGAGAT AGTCAGAATG CAGAACGTTC TTATAATGTT |
| 151 | CAAGCTGGGG ATGTCTATAG CCTTACTGGT GATGTCTCAA TATCTAACGT |
| 201 | CGATAACTCT GCATTAAATA AAGCCTGCTT CAATGTGACC TCAGGAAGTG |
| 251 | TGACGTTCGC AGGAAATCAT CATGGGTTAT ATTTTAATAA TATTTCCTCA |
| 301 | GGAACTACAA AGGAAGGGGC TGTACTTTGT TGCCAAGATC CTCAAGCAAC |
| 351 | GGCACGTTTT TCTGGGTTCT CCACGCTCTC TTTTATTCAG ACCCCCGGAG |
| 401 | ATATTAAAGA ACAGGGATGT CTCTATTCAA AAAATGCACT TATGCTCTTA |
| 451 | AACAATTATG TAGTGCGTTT TGAACAAAAC CAAAGTAAGA CTAAAGGCGG |
| 501 | AGCTATTAGT GGGGCGAATG TAACTATAGT AGGCAACTAC GATTCCGTCT |
| 551 | CTTTCTATCA GAATGCAGCC ACTTTTGGAG GTGCTATCCA TTCTTCAGGT |
| 601 | CCCCTACAGA TTGCAGTAAA TCAGGCAGAG ATAAGATTTG CACAAAATAC |
| 651 | TGCCAAGAAT GGTTCTGGAG GGGCTTTGTA CTCCGATGGT GATATTGATA |
| 701 | TTGATCAGAA TGCTTATGTT CTATTTCGAG AAAATGAGGC ATTGACTACT |
| 751 | GCTATAGGTA AGGGAGGGGC TGTCTGTTGT CTTCCCACTT CAGGAAGTAG |
| 801 | TACTCCAGTT CCTATTGTGA CTTTCTCTGA CAATAAACAG TTAGTCTTTG |
| 851 | AAAGAAACCA TTCCATAATG GGTGGCGGAG CCATTTATGC TATCAAACTT |
| 901 | AGCATCTCTT CAGGAGGTCC TACTCTATTT ATCAATAATA TATCATATGC |
| 951 | AAATTCGCAA AATTTAGGTG GAGCTATTGC CATTGATACT GGAGGGGAGA |
| 1001 | TCAGTTTATC AGCAGAGAAA GGAACAATTA CATTCCAAGG AAACCGGACG |
| 1051 | AGCTTACCGT TTTTGAATGG CATCCATCTT TTACAAAATG CTAAATTCCT |
| 1101 | GAAATTACAG GCGAGAAATG GATACTCTAT AGAATTTTAT GATCCTATTA |
| 1151 | CTTCTGAAGC AGATGGGTCT ACCCAATTGA ATATCAACGG AGATCCTAAA |
| 1201 | AATAAAGAGT ACACAGGGAC CATACTCTTT TCTGGAGAAA AGAGTCTAGC |
| 1251 | AAACGATCCT AGGGATTTTA AATCTACAAT CCCTCAGAAC GTCAACCTGT |
| 1301 | CTGCAGGATA CTTAGTTATT AAAGAGGGGG CCGAAGTCAC AGTTTCAAAA |
| 1351 | TTCACGCAGT CTCCAGGATC GCATTTAGTT TTAGATTTAG GAACCAAACT |
| 1401 | GATAGCCTCT AAGGAAGACA TTGCCATCAC AGGCCTCGCG ATAGATATAG |
| 1451 | ATAGCTTAAG CTCATCCTCA ACAGCAGCTG TTATTAAAGC AAACACCGCA |
| 1501 | AATAAACAGA TATCCGTGAC GGACTCTATA GAACTTATCT CGCCTACTGG |
| 1551 | CAATGCCTAT GAAGATCTCA GAATGAGAAA TTCACAGACG TTCCCTCTGC |
| 1601 | TCTCTTTAGA GCCTGGAGCC GGGGGTAGTG TGACTGTAAC TGCTGGAGAT |
| 1651 | TTCCTACCGG TAAGTCCCCA TTATGGTTTT CAAGGCAATT GGAAATTAGC |
| 1701 | TTGGACAGGA ACTGGAAACA AAGTTGGAGA ATTCTTCTGG GATAAAATAA |
| 1751 | ATTATAAGCC TAGACCTGAA AAACAAGGAA ATTTAGTTCC TAATATCTTG |
| 1801 | TGGGGGAATG CTGTAGATGT CAGATCCTTA ATGCAGGTTC AAGAGACCCA |
| 1851 | TGCATCGAGC TTACAGACAG ATCGAGGGCT GTGGATCGAT GGAATTGGGA |
| 1901 | ATTTCTTCCA TGTATCTGCC TCCGAAGACA ATATAGGGTA CCGTCATAAC |
| 1951 | AGCGGTGGAT ATGTTCTATC TGTAAATAAT GAGATCACAC CTAAGCACTA |
| 2001 | TACTTCGATG GCATTTTCCC AACTCTTTAG TAGAGACAAG GACTATGCGG |
| 2051 | TTTCCAACAA CGAATACAGA ATGTATTTAG GATCGTATCT CTATCAATAT |
| 2101 | ACAACCTCCC TAGGGAATAT TTTCCGTTAT GCTTCGCGTA ACCCTAATGT |
| 2151 | AAACGTCGGG ATTCTCTCAA GAAGGTTTCT TCAAAATCCT CTTATGATTT |
| 2201 | TTCATTTTTT GTGTGCTTAT GGTCATGCCA CCAATGATAT GAAAACAGAC |
| 2251 | TACGCAAATT TCCCTATGGT GAAAAACAGC TGGAGAAAcA ATTGTTGGGC |
| 2301 | TATAGAGTGC GGAGGGAGCA TGCCTCTATT GGTATTTGAG AACCGAAGAC |
| 2351 | TTTTCCAAGG TGCCATCCCA TTTATGAAAC TACAATTAGT TTATGCTTAT |
| 2401 | CAGGGAGATT TCAAAGAGAC GACTGCAGAT GGCCGTAGAT TTAGTAATGG |
| 2451 | CAGTTTAACA TCGATTTCTG TACCTCTAGG CATACGCTTT GAGAAGCTGG |
| 2501 | CACTTTCTCA GGATGTACTC TATGACTTTA GTTTCTCCTA TATTCCTGAT |
| 2551 | ATTTTCCGTA AGGATCCCTC ATGTGAAGCT GCTCTGGTGA TTAGCGGAGA |
| 2601 | CTCCTGGCTT GTTCCGGCAG CACACGTATC AAGACATGCT TTTGTAGGGA |
| 2651 | GTGGAACGGG TCGGTATCAC TTTAACGACT ATACTGAGCT CTTATGTCGA |
| 2701 | GGAAGTATAG AATGCCGCCC CCATGCTAGG AATTATAATA TAAACTGTGG |
| 2751 | AAGCAAATTT CGTTTTTAG |

[0442] The PSORT algorithm predicts an outer membrane location (0.921).

[0443] The protein was expressed in E. coli and purified both as a his-tag and GST-fusion product. The GST-fusion is shown in FIG. 21A. This recombinant protein was used to immunise mice, whose sera were used in a Western blot (FIG. 21B) and for FACS analysis (FIG. 21C).

[0444] This protein also showed good cross-reactivity with human sera, including sera from patients with pneumonitis.

[0445] These experiments show that cp6260 is a surface-exposed and immunoaccessible protein, and that it is a useful immunogen. These properties are not evident from the sequence alone.

### Example 22

[0446] The following C. pneumoniae protein (PID 4376456) was expressed <SEQ ID 43; cp6456>:

| | |
|---|---|
| 1 | MSSPVNNTPS APNIPIPAPT TPGIPTTKPR SSFIEKVIIV AKYILFAIAA |
| 51 | TSGALGTILG LSGALTPGIG IALLVIFFVS MVLLGLILKD SISGGEERRL |
| 101 | REEVSRFTSE NQRLTVITTT LETEVKDLKA AKDQLTLEIE AFRNENGNLK |
| 151 | TTABDLEEQV SKLSEQLEAL ERINQLIQAN AGDAQEISSE LKKLISGWDS |
| 201 | KVVEQINTSI QALKVLLGQE WVQEAQTHVK AMQEQIQALQ ABILGMHNQS |
| 251 | TALQKSVENL LVQDQALTRV VGELLESENK LSQACSALRQ EIEKLAQHRT |
| 301 | SLQQRIDAML AQEQNLABQV TALEKMKQEA QKAESEFIAC VRDRTFGRRE |
| 351 | TPPPTTPVVE GDESQEEDEG GTPPVSQPSS PVDRATGDGQ * |

[0447] The cp6456 nucleotide sequence <SEQ ID 44> is:

| | |
|---|---|
| 1 | ATGTCATCTC CTGTAAATAA CACACCCTCA GCACCAAACA TTCCAATACC |
| 51 | AGCGCCCACG ACTCCAGGTA TTCCTACAAC AAAACCTCGT TCTAGTTTCA |
| 101 | TTGAAAAGGT TATCATTGTA GCTAAGTACA TACTATTTGC AATTGCAGCC |
| 151 | ACATCAGGAG CACTCGGAAC AATTCTAGGT CTATCTGGAG CGCTAACCCC |
| 201 | AGGAATAGGT ATTGCCCTTC TTGTTATCTT CTTTGTTTCT ATGGTGCTTT |
| 251 | TAGGTTTAAT CCTTAAAGAT TCTATAAGTG GAGGAGAAGA ACGCAGGCTC |
| 301 | AGAGAAGAGG TCTCTCGATT TACAAGTGAG AATCAACGGT TGACAGTCAT |
| 351 | AACCACAACA CTTGAGACTG AAGTAAAGGA TTTAAAAGCA GCTAAAGATC |
| 401 | AACTTACACT TGAAATCGAA GCATTTAGAA ATGAAAACGG TAATTTAAAA |
| 451 | ACAACTGCTG AGGACTTAGA AGAGCAGGTT TCTAAACTTA GCGAACAATT |
| 501 | AGAAGCACTA GAGCGAATTA ATCAACTTAT CCAAGCAAAC GCTGGAGATG |
| 551 | CTCAAGAAAT TTCGTCTGAA CTAAAGAAAT TAATAAGCGG TTGGGATTCC |
| 601 | AAAGTTGTTG AACAGATAAA TACTTCTATT CAAGCATTGA AAGTGTTATT |
| 651 | GGGTCAAGAG TGGGTGCAAG AGGCTCAAAC ACACGTTAAA GCAATGCAAG |
| 701 | AGCAAATTCA AGCATTGCAA GCTGAAATTC TAGGAATGCA CAATCAATCT |
| 751 | ACAGCATTGC AAAAGTCAGT TGAGAATCTA TTAGTACAAG ATCAATCTCT |
| 801 | AACAAGAGWA GTAGGTGAGT TGTTAGAATC TGAGAACAAG CTAAGCCAAG |
| 851 | CTTGTTCTGC GCTACGTCAA GAAATAGAAA AGTTGGCCCA ACATGAAACA |
| 901 | TCTTTGCAAC AACGTATTGA TGCGATGCTA GCCCAAGAGC AAAATTTGGC |
| 951 | AGAGCAGGTC ACAGCCCTTG AAAAAATGAA ACAAGAAGCT CAGAAGGCTG |
| 1001 | AGTCCGAGTT CATTGCTTGT GTACGTGATC GAACTTTCGG ACGTCGTGAA |
| 1051 | ACACCTCCAC CAACAACACC TGTAGTTGAA GGTGATGAAA GTCAAGAAGA |
| 1101 | AGCAGAAGGA GGTACTCCCC CAGTATCACA ACCATCTTCA CCCGTAGATA |
| 1151 | GAGCAACAGG AGATGGTCAG TAA. |

[0448] The PSORT algorithm predicts inner membrane (0.127).

[0449] The protein was expressed in E. coli and purified as a GST-fusion product, as shown in FIG. 22A. The recombinant protein was used to immunise mice, whose sera were used in a Western blot (FIG. 22B) and for FACS analysis (FIG. 22C). A his-tag protein was also expressed.

[0450] These experiments show that cp6456 is a surface-exposed and immunoaccessible protein, and that it is a useful immunogen. These properties are not evident from the sequence alone.

### Example 23

[0451] The following C. pneumoniae protein (PID 4376729) was expressed <SEQ ID 45; cp6729>:

| | |
|---|---|
| 1 | MKIPLHKLLI SSTLVTPILL SIATYGADAS LSPTDSFDGA GGSTFTPEST |
| 51 | ADANGTNYVL SGNVYINDAG KGTALTGCCF TETTGDLTFT GKGYSPSFNT |
| 101 | VDAGSNAGAA ASTTADKALT FTGFSNISFI AAPGTTVASG KSTLSSAGAL |
| 151 | NLTDNGTILF SQNVSNEANN NGGAITTKTL SISGNTSSIT FTSNSAKKLG |
| 201 | GAIYSSAAAS ISGNTGQLVF MNNKGETGGG ALGFEASSSI TQNSSLFFSG |
| 251 | NTATDAAGKG GAIYCEKTGE TPTLTISGNK SLTFAENSSV TQGGAICAHG |
| 301 | LDLSAAGPTL FSNNRCGNTA AGKGGAIATA DSGSLSLSAN QGDITFLGNT |
| 351 | LTSPSAPTST RNAIYLGSSA KITNLRAAQG QSIYFYDPIA SNTTGASDVL |
| 401 | TINQPDSNSP LDYSGTIVFS GEKLSADEAK AADNFTSILK QPLALASGTL |
| 451 | ALKGNVELDV NGFTQTEGST LLMQPGTKLK ADTEAXSLTK LVVDLSALEG |
| 501 | NESVSIETAG ANKTITLTSP LVFQDSSGNF YESHTIWQAF TQPLVVFTAA |
| 551 | TAASDIYIDA LLTSPVQTPE PHYGYQGHWE ATWADTSTAK SGTMTWVTTG |
| 601 | YNPNPERRAS VVPDSIMASP TDIRTLQQIM TSQANSIYQQ RGLWASGTAN |
| 651 | FFHKDKSGTN QAFRHKSYGY IVGGSAEDFS ENIFSVAFCQ LFGKDKDLFI |
| 701 | VENTSHNTAA SLYLQHRAFL GGLPMPSFGS ITDMLRDIPL ILNAQLSYSY |
| 751 | TKNDMDTRYT SYPEAQGSWT NNSGALELGG SLALYLPKEA PFFQGYFPFL |
| 801 | EPQAVYSRQQ NFKESGAEAR AFDDGDLVNC SIPVGIRLEK ISEDERNNFE |
| 851 | ISLAYXGDVY RKNPRSRTSL MVSGASWTSL CKNLARQAPL ASAGSHLTAS |
| 901 | PHVSLSGEAA YELRGSAHIY NVDCGLRYSF * |

[0452] A predicted signal peptide is highlighted.

[0453] The cp6729 nucleotide sequence <SEQ ID 46> is:

| | |
|---|---|
| 1 | ATGAAAATAC CCTTGCACAA ACTCCTGATC TCTTCGACTC TTGTCACTCC |
| 51 | CATTCTATTG AGCATTGCAA CTTACGGAGC AGATGCTTCT TTATCCCCTA |
| 101 | CAGATAGCTT TGATGGAGCG GGCGGCTCTA CATTTACTCC AAAATCTACA |
| 151 | GCAGATGCCA ATGGAACGAA CTATGTCTTA TCAGGAAATG TCTATATAAA |
| 201 | CGATGCTGGG AAAGGCACAG CATTAACAGG CTGCTGCTTT ACAGAAACTA |
| 251 | CGGGTGATCT GACATTTACT GGAAAGGGAT ACTCATTTTC ATTCAACACG |
| 301 | GTAGATGCGG GTTCGAATGC AGGAGCTGCG GCAAGCACAA CTGCTGATAA |
| 351 | AGCCCTAACA TTCACAGGAT TTTCTAACCT TTCCTTCATT GCAGCTCCTG |
| 401 | GAACTACAGT TGCTTCAGGA AAAAGTACTT TAAGTTCTGC AGGAGCCTTA |
| 451 | AATCTTACCG ATAATGGAAC GATTCTCTTT AGCCAAAACG TCTCCAATGA |
| 501 | AGCTAATAAC TATGGCGGAG CGATCACCAC AAAAACTCTT TCTATTTCTG |
| 551 | GGAATACCTC TTCTATAACC TTCACTAGTA ATAGCGCAAA AAAATTAGGT |
| 601 | GGAGCGATCT ATAGCTCTGC GGCTGCAAGT ATTTCAGGAA ACACCGGCCA |
| 651 | GTTAGTCTTT ATGAATAATA AAGGAGAAAC TGGGGGTGGG GCTCTGGGCT |
| 701 | TTGAAGCCAG CTCCTAGATT ACTCAAAATA GCTCCCTTTT CTTCTCTGGA |
| 751 | AACACTGCAA CAGATGCTGC AGGCAAGGGC GGGGCCATTT ATTGTGAAAA |
| 801 | AACAGGAGAG ACTCCTACTC TTACTATCTC TGGAAATAAA AGTCTGACCT |
| 851 | TCGCCGAGAA CTCTTCAGTA ACTCAAGGCG GAGCAATCTG TGCCCATGGT |
| 901 | CTAGATCTTT CCGCTGCTGG CCCTACCCTA TTTTCAAATA ATAGATGCGG |
| 951 | GAACACAGCT GCAGGCAAGQ GCGGCGCTAT TGCAATTGCC GACTCTGGAT |
| 1001 | CTTTAAGTCT CTCTGCAAAT CAAGGAGACA TCACGTTCCT TGGCAACACT |
| 1051 | CTAACCPCAA CCTCCGCCCC AACATCGACA CGGAATGCTA TCTACCTGGG |
| 1101 | ATCGTCAGCA AAAATTACGA ACTTAAGGGC AGCCCAAGGC CAATCTATCT |
| 1151 | ATTTCTATGA TCCGATTGCA TCTAACACCA CAGGAGCTTC AGACGTPCTG |
| 1201 | ACCATCAACC AACCGGATAG CAACTCGCCT TTAGATTATT CAGGAACGAT |
| 1251 | TGTATTTTCT GGGGAAAAGC TCTCTGCAGA TGAAGCGAAA GCTGCTGATA |
| 1301 | ACTTCACATC TATATTAAAG CAACCATTGG CTCTAGCCTC TGGAACCTTA |
| 1351 | GCACTCAAAG GAAATGTCGA GTTAGATGTC AATGGTTTCA CACAGACTGA |
| 1401 | AGGCTCTACA CTCCTCATGC AACCAGGAAC AAAGCTCAAA GCAGATACTG |
| 1451 | AAGCTATCAG TCTTACCAAA CTTGTCGTTG ATCTTTCTGC CTTACAGGGA |
| 1501 | AATAAGAGTG TGTCCATTGA AACAGCAGGA GCCAACAAAA CTATAACTCT |
| 1551 | AACCTCTCCT CTTGTTTTCC AAGATAGTAG CGGCAATTTT TATGAATGCC |
| 1601 | ATACGATAAA CCAAGCCTTC ACGCAGCCTT TGGTGGTATT CACTGCTGCT |
| 1651 | ACTGCTGCTA GCGATATTTA TATCGATGCG CTTCTCACTT CTCCAGTACA |
| 1701 | AACTCCAGAA CCTCATTACG GGTATCAGGG ACATTGGGAA GCCACTTGGG |
| 1751 | CAGACACATC AACTGCAAAA TCAGGAACTA TGACTTGGGT AACTACGGGC |
| 1801 | TACAACCCTA ATCCTGAGCG TAGAGCTTCC GTAGTTCCCG ATTCATTATG |
| 1851 | GGCATCCTTT ACTGACATTC GCACTCTACA GCAGATCATG ACATCTCAAG |
| 1901 | CGAATAGTAT CTATCAGCAA CGAGGACTCT GGGCATCAGG AACTGCGAAT |
| 1951 | TTCTTCCATA AGGATAAATC AGGAACTAAC CAAGCATTCC GACATAAAAG |
| 2001 | CTACGGCTAT ATTGTTGGAG GAAGTGCTGA AGATTTTTCT GAAAATATCT |
| 2051 | TCAGTGTAGC TTTCTGCCAG CTCTTCGGTA AAGATAAAGA CCTGTTTATA |
| 2101 | GTTGAAAATA CCTCTCATAT CTATTTAGCG TCGCTATACC TGCAACATCG |
| 2151 | AGCATTCCTA GGAGGACTTC CCATGCCCTC ATTTGGAAGT ATCACCGACA |
| 2201 | TGCTGAAAGA TATTCCTCTC ATTTTGAATG CCCAGCTAAG CTACAGCTAC |
| 2251 | ACTAAAAATG ATATGGATAC TCGCTATACT TCCTATCCTG AAGCTCAAGG |
| 2301 | CTCTTGGACC AATAACTCTG GGGCTCTAGA GCTCGGAGGA TCTCTGGCTC |
| 2351 | TATATCTCCC TAAAGAAGCA CCGTTCTTCC AGGGATATTT CCCCTTCTTA |
| 2401 | AAGTTCCAGG CAGTCTACAG CCGCCAACAA AACTTTAAAG AGAGTGGCGC |
| 2451 | TGAAGCCCGT GCTTTTGATG ATGGAGACCT AGTGAACTGC TCTATCCCTG |
| 2501 | TCGGCATTCG GTTAGATAAA ATCTCCGAAG ATGAAAAAAA TAATTTCGAG |
| 2551 | ATTTCTCTAG CCTACATPGG TGATGTGTAT CGTAAAAATC CCCGTTCGCG |
| 2601 | TACTTCTCTA ATGGTCAGTG GAGCCTCTTG GACTTCGCTA TGTAAAAACC |
| 2651 | TCGCACGACA AGCCTTCTTA GCAAGTGCTG GAAGCCATCT GACTCTCTCC |
| 2701 | CCTCATGTAG AACTCTCTGG GGAAGCTGCT TATGAGCTTC GTGGCTCAGC |
| 2751 | ACACATCTAC AATGTAGATT GTGGGCTAAG ATACTCATTC TAG |

[0454] The PSORT algorithm predicts outer membrane (0.927).

[0455] The protein was expressed in E. coli and purified as a GST-fusion product, as shown in FIG. 23A. The recombinant protein was used to immunise mice, whose sera were used in a Western blot (FIG. 23B) and for FACS analysis (FIG. 23C). A his-tag protein was also expressed.

[0456] The cp6729 protein was also identified in the 2D-PAGE experiment (Cpn0446) and showed good cross-reactivity with human sera, including sera from patients with pneumonitis.

[0457] These experiments show that cp6729 is a surface-exposed and immunoaccessible protein, and that it is a useful immunogen. These properties are not evident from the sequence alone.

### Example 24

[0458] The following C. pneumoniae protein (PID 4376849) was expressed <SEQ ID 47; cp6849>:

| | |
|---|---|
| 1 | MSKLIRRVVT VLALTSMASC FASGGIEAAV AESLITKIVA SAETKPAPVP |
| 51 | HTAKKVPLVR RNKQPVEQKS RGAPCDKEFY PCEEGRCQPV EAQQESCYGR |
| 101 | LYSVIWNDDC NVEICQSVPE YATVGSPYPI EILAIGKKDC VDVVITQQLP |
| 151 | CEAEFVSSDP ETTPTSDGKL VWKIDRLGAG DKCKITVWVK PLKEGCCFTA |
| 201 | ATVCACPELR SYTKCGQPAI CIKQEGPDQA CLRCPVCYKI EVVNTGSAIA |
| 251 | RNVTVDNPVP DGYSHASGQR VLSFNLGDMR PGVKKVFTVE FCPQRRGQIT |
| 301 | NVATVTYCGG HXCSAIWTTV VNBPCVQVNI SGADWSYVCK PVEYSISVSN |
| 351 | PGDLVLHDVV IQDTLPSGVT VLEAPGGEIC CNKVVWRIKE MCPGETLQFK |
| 401 | LVVKAQVPGR FTNQVAVTSE SNCGTCTSCA ETTTHWKGLA ATHNCVLDTN |
| 451 | DPICVGENTV YRICVTNRGS AEDTNVSLIL KFSKELQPIA SSGPTKGTIS |
| 501 | GNTVVFDALP KLGSKESVEF SVTLKGIAPG DARGEAILSS DTLTSPVSDT |
| 551 | ENTHVY* |

[0459] A predicted signal peptide is highlighted.

[0460] The cp6849 nucleotide sequence <SEQ ID 48> is:

| | |
|---|---|
| 1 | ATGTCCAAAC TCATCAGACG AGTAGTTACG GTCCTTGCGC TAACGAGTAT |
| 51 | GGCGAGTTGC TTTGCCAGCG GGGGTATAGA GGCCGCTGTA GCAGAGTCTC |
| 101 | TGATTACTAA GATCGTCGCT AGTGCGGAAA CAAAGCCAGC ACCTGTTCCT |
| 151 | ATGACAGCGA AGAAGGTTAG ACTTGTCCGT AGAAATAAAC AACCAGTTGA |
| 201 | ACAAAAAAGC CGTGGTGCTT TTTGTGATAA AGAATTTTAT CCCTGTGAAG |
| 251 | AGGGACGATG TCAACCTGTA GAGGCTCAGC AAGAGTCTTG CTACGGAAGA |
| 301 | TTGTATTCTG TAAAAGTAAA CGATGATTGC AACGTAGAAA TTTGCCAGTC |
| 351 | CGTTCCAGAA TACGCTACTG TAGGATCTCC TTACCCTATT GAAATCCTTG |
| 401 | CTATAGGCAA AAAAGATTGT GTTGATGTTG TGATTACACA ACAGCTACCT |
| 451 | TGCGAAGCTG AATTCGTAAG CAGTGATCCA GAAACAACTC CTACAAGTGA |
| 501 | TGGGAAATTA GTCTGGAAAA TCGATCGCCT GGGWGCAGGA GATAAATGCA |
| 551 | AAATTACTGT ATGGGTAATA CCTCTTAAAG AAGGTTGCTG CTTCACAGCT |
| 601 | GCTACTGTAT GTGCTTGCCC AGAGCTCCGT TCTTATACTA AAPGCGGTCA |
| 651 | ACCACCATTT TGTATTAAGC AAQAAGGACC TGACTGTGCT TGCCTAAGAT |
| 701 | GCCCTGTATG CTACAAAATC GAAGTAGTGA ACACAGGATC TGCTATTGCC |
| 751 | CGTAACGTAA CTGTAGATAA TCCTGTTCCC GATGGCTATT CTCATGCATC |
| 801 | TGGTCAAAGA GTTCTCTCTT TTAAGTTAGG AGACATGAGA CCTGGCGATA |
| 851 | AAAAGGTATT TACAGTTGAG TTCTGCCCTC AAAGAAGAGG TCAAATCACT |
| 901 | AACGTTGCTA CTGTAACTTA CTGCGGTGGA CACAAATGTT CTGCAAATGT |
| 951 | AACTACAGTT GTTAATGAGC CTTGTGTACA AGTAAATATC TCTGGTGCTG |
| 1001 | ATTGGTCTTA CGTATGTAAA CCTGTGGAGT ACTCTATCTC AGTATCGAAT |
| 1051 | CCTGGAGACT TGGTTCTTCA TGATGTCGTG ATCCAAGATA CACTCCCTTC |
| 1101 | TGGTGTTACA GTACTCGAAG CTCCTGGTGG AGAGATCTGC TGTAATAAAG |
| 1151 | TTGTTTGGCG TATTAAAGAA ATGTGCCCAG GAGAAACCCT CCAGTTTAAA |
| 1201 | CTTGTAGTGA AAGCTCAAGT TCCTGGAAGA TTCACAAATC AAGTTGCAGT |
| 1251 | AACTAGTGAG TCTAACTGCG GAACATGTAC ATCTTGCGCA GAAACAACAA |
| 1301 | CACATTGGAA AGGTCTTGCA GCTACCCATA TGTGCGTMTT AGACACAAAT |
| 1351 | GATCCTATCT GTGTAGGAGA AAATACTGTC TATCGTATCT GTGTAACTAA |
| 1401 | CCGTGGTTCT GCTGAAAATA CTAACGTATC TTTAATCTTG AAGTTCTCAA |
| 1451 | AAGAACTTCA GCCAATAGCT TCTTCAGGTC CAACTAAAGG AACGATTTCA |
| 1501 | GGTAATACCG TTGTTTTCGA CGCTTTACCT AAACTCGGTT CTAAGGAATC |
| 1551 | TGTAGAGTTT TCTGTTACCT TGAAAGGTAT TGCTCCCGGA GATGCTCGCG |
| 1601 | GCGAAGCTAT TCTTTCTTCT GATACACTGA CTTCACCAGT ATCAGACACA |
| 1651 | GAAAATACCC ACGTGTATTA A |

[0461] The PSORT algorithm predicts periplasmic space (0.93),

[0462] The protein was expressed in E. coli and purified as a GST-fusion product, as shown in FIG. 24A, and also as a his-tag protein. The recombinant proteins were used to immunise mice, whose sera were used in a Western blot (FIG. 24B) and for FACS analysis FIG. 24C).

[0463] The cp6849 protein was also identified in the 2D-PAGE experiment (Cpn0557).

[0464] These experiments show that cp6849 is a surface-exposed and immunoaccessible protein, and that it is a useful immunogen. These properties are not evident from the sequence alone.

### Example 25

[0465] The following C. pneumoniae protein (PID 4376273) was expressed <SEQ ID 49; cp6273>:

| | |
|---|---|
| 1 | MGLFHLTFG LLLCSLPISL VAKFPESVGH KILYISTQST |
| | QQALATYLEA |
| 51 | LDAYGDHDPP VLRKIGEDYL KQSIHSSDPQ TRXSTIIGAG |
| | LAGSSEAKDV |
| 101 | LSQAMETADP LQQLLVLSAV SGHLGKTSDD LLFKALASPY |
| | PVIRLEAAYR |
| 151 | LANLKNTKVI DHLHSFIHKL PEEIQCLSAA IFLRLETEES |
| | DAYIRDLLAA |
| 201 | KKSAIRSATA LQIGEYQQKR FLPTLRNLLT SASPQDQEAI |
| | LYALGKLKDG |
| 251 | QSYYNIKKQL QKPDVDVTLA AAQALIALGK EEDALPVIKX |
| | QALEERPRAL |
| 301 | YALRHLPSEI GIPIALPIFL KTKSNEAKLN VALALLELGC |
| | DTPKLLEYIT |
| 351 | ERLVQPHYNE TLALSFSKGR TLQNWKRVNI IVPQDPQERE |
| | RLLSTTRGLE |
| 401 | EQILTFLFRL PKEAYLPCIY KLLASQKTQL ATTAISFLSH |
| | TSHQEALDLL |
| 451 | FQAAKLPGEP IIBAYADLAI YNLTKDPEKK RSLHDYAKKL |
| | IQETLLFVDT |
| 501 | ENQRPHPSMP YLRYQVTPES RTKLMLDILE TLATSKSSED |
| | IRLLIQLMTE |
| 551 | GDAKNFPVLA GLLIKIVE* |

[0466] A predicted signal peptide is highlighted.

[0467] The cp6273 nucleotide sequence <SEQ ID 50> is:

| | |
|---|---|
| 1 | ATGGGACTAT TCCATCTAAC TCTCTTTGGA CTTTTATTGT |
| | GTAGTCTTCC |
| 51 | CATTTCTCTT GTTGCTAAAT TCCCTGAGTC TGTAGGTCAT |
| | AAGATCCTTT |
| 101 | ATATAAGTAC GCAATCTACA CAGCAGGCCT TAGCAACATA |
| | TCTGGAAGCT |
| 151 | CTAGATGCCT ACGGTGATCA TGACTTCTTC GTTTTAAGAA |
| | AAATCGGAGA |
| 201 | AGACTATCTC AAGCAAAGCA TCCACTCCTC AGATCCGCAA |
| | ACTAGAAAAA |
| 251 | GCACCATCAT TGGAGCAGGC CTGGCGGGAT CTTCAGAAGC |
| | CTTGGACGTG |
| 301 | CTCTCCCAAG CTATGGAAAC TGCAGACCCC CTGCAGCAGC |
| | TACTGGTTTT |
| 351 | ATCGGCAGTC TCAGGACATC TTGGGAAAAC TTCTGACGAC |
| | TTACTGTTTA |
| 401 | AAGCTTTAGC ATCTCCCTAT CCTGTCATCC GCTTAGAAGC |
| | CGCCTATAGA |
| 451 | CTTGCTAATT TGAAGAACAC TAAAGTCATT GATCATCTAC |
| | ATTCTTTCAT |
| 501 | TCATAAGCTT CCCGAAGAAA TCCAATGCCT ATCTGCGGCA |
| | ATATTCCTAC |
| 551 | GCTTGGAGAC TGAAGAATCT GATGCTTATA TTCGGGATCT |
| | CTTAGCTGCC |
| 601 | AAGAAAAGCG CGATTCGGAG TGCCACAGCT TTGCAGATCG |
| | GAGAATACCA |
| 651 | ACAAAAACGC TTTCTTCCGA CACTTAGGAA TTTGCTAACG |
| | AGTGCGTCTC |
| 701 | CTCAAGATCA AGAAGCTATT CTTTATGCTT TAGGGAAGCT |
| | TAAGGATGGT |
| 751 | CAGAGCTACT ACAATATAAA AAAGCAATTG CAGAAGCCTG |
| | ATGTGGATGT |
| 801 | CACTTTAGCA GCAGCTCAAG CTTTAATTGC TTTGGGGAAA |
| | GAAGAGGACG |
| 851 | CTCTTCCCGT GATAAAAAAG CAAGCACTTG AGGAGCGGCC |
| | TCGAGCCCTG |
| 901 | TATGCCTTAC GGCATCTACC CTCTGAGATA GGGATTCCGA |
| | TTGCCCTGCC |
| 951 | GATATTCCTA AAAACTAAGA ACAGCGAAGC CAAGTTGAAT |
| | GTAGCTTTAG |
| 1001 | CTCTCTTAGA GTTAGGGTGT GACACCCCTA AACTACTGGA |
| | ATACATTACC |
| 1051 | GAAAGGCTTG TCCAACCACA TTATAATGAG ACTCTAGCCT |
| | TGAGTTTCTC |
| 1101 | TAAGGGGCGT ACTTTACAAA ATTGGAAGCG GGTTAACATC |
| | ATAGTCCCTC |
| 1151 | AAGATCCCCA GGAGAGGGAA AGGTTGCTCT CCACAACCCG |
| | AGGTCTTGAA |
| 1201 | GAGCAGATCC TTACGTTTCT CTTCCGCCTA CCTAAAGAAG |
| | CTTACCTCCC |
| 1251 | CTGTATTTAT AAGCTTTTGG CGAGTCAGAA AACTCAGCTT |
| | GCCACTACTG |
| 1301 | CGATTTCTTT TTTAAGTCAC ACCTCACATC AGGAAGCCTT |
| | AGATCTACTT |
| 1351 | TTCCAAGCTG CGAAGCTTCC TGGAGAACCT ATCATCCGCG |
| | CCTATGCAGA |
| 1401 | TCTTGCTATT TATAATCTCA CCAAAGATCC TGAAAAAAAA |
| | CGTTCTCTCC |
| 1451 | ATGATTATGC AAAAAAGCTA ATTCAGGAAA CCTTGTTATT |
| | TGTGGACACG |
| 1501 | GAAAACCAAA GACCCCATCC CAGCATGCCC TATCTACGTT |
| | ATCAGGTCAC |
| 1551 | CCCAGAAAGC CGTACGAAGC TCATGTTGGA TATTCTAGAG |
| | ACACTAGCCA |
| 1601 | CCTCGAAGTC TTCCGAAGAT ATCCGTTTAT TGATACAACT |
| | GATGACGGAA |
| 1651 | GGAGATGCAA AAAATTTCCC AGTCCTTGCA GGCTTACTCA |
| | TAAAAATTGT |
| 1701 | GGAGTAA |

[0468] The PSORT algorithm predicts a periplasmic location (0.922).

[0469] The protein was expressed in E. coli and purified as a his-tag product and as a GST-fusion product, as shown in FIG. 25A. The recombinant GST-fusion was used to immunise mice, whose sera were used in a Western blot (FIG. 25B) and for FACS analysis (FIG. 25C).

[0470] This protein also showed good cross-reactivity with human sera, including sera from patients with pneumonitis.

[0471] These experiments show that cp6273 is a surface-exposed and immunoaccessible protein, and that it is a useful immunogen. These properties are not evident from the sequence alone.

### Example 26

[0472] The following C. pneumoniae protein (PID 4376735) was expressed <SEQ ID 51; cp6735>:

| | |
|---|---|
| 1 | MTILRNFLTC SALFLALPAA AQVVYLHESD GYNGAINNKS |
| | LEPKITCYPE |
| 51 | GTSYIFLDDV RISNVKHDQE DAGVFINRSG NLFFHGNRON |
| | FTFHNLMTEG |
| 101 | FGAAISNRVG DTTLTLSNFS YLAFTSAPLL PQGQGAIYSL |
| | GSVNIENSEE |
| 151 | VTFCGNYSSW SGAAIYTPYL LGSKASRPSV NLSGNRYLVF |
| | RDNVSQGYGG |
| 201 | AISTHNLTLT TRGPSCFENN HAYHDVNSNG GAIAIAPGGS |
| | ISISVKSGDL |
| 251 | IFKGNTASQD GNTIHNSIHL QSGAQFRNLR AVSESGVYFY |
| | DPISRSESHK |
| 301 | ITDLVINAPE GKETYEGTIS FSGLCLDDHE VCAENLTSTI |
| | LQDVTLAGGT |
| 351 | LSLSDGVTLQ LUSFKQEASS TLTMSPGTTL LCSGDARVQN |
| | LHILIEDTDN |
| 401 | FVPVRIRAED KDALVSLEKL KVAFEAYWSV YDFPQFKEAF |
| | TIPLLELLGP |
| 451 | SFDSLLLGET TLERTQVITE NDAVRGPWSL SWEEYPPSLD |
| | KDRRITPTKK |
| 501 | TVFLTWNPEI TSTP* |

[0473] A predicted signal peptide is highlighted.

[0474] The cp6735 nucleotide sequence <SEQ ID 52> is:

| | |
|---|---|
| 1 | ATGACCATAC TTCGAAATTT TCTTACCTGC TCGGCTTTAT |
| | TCCTCGCTCT |
| 51 | CCCTGCAGCA GCACAAGTTG TATATCTTCA TGAAAGTGAT |
| | GGTTATAACG |
| 101 | GTGCTATCAA TAATAAAAGC TTAGAACCTA AAATTACCTG |
| | TTATCCAGAA |
| 151 | GGAACTTCTT ACATCTTTCT AGATGACGTG AGGATTTCCA |
| | ACGTTAAGCA |
| 201 | TGATCAAGAA GATGCTGGGG TTTTTATAAA TCGATCTGGG |
| | AATCTTTTTT |
| 251 | TCATGGGCAA CCGTTGCAAC TTCACTTTTC ACAACCTTAT |
| | GACCGAGGGT |
| 301 | TTTGGCGCTG CCATTTCGAA CCGCGTTGGA GACACCACTC |
| | CCACTCTCTC |
| 351 | TAATTTTTCT TACTTAGCGT TCACCTCAGC ACCTCTACTA |
| | CCTCAAGGAC |
| 401 | AAGGAGCGAT TTATAGTCTT GGTTCCGTGA TGATCGAAAA |
| | TAGTGAGGAA |
| 451 | GTGACTTTCT GTGGGAACTA CTCTTCGTGG AGTGGAGCTG |
| | CGATTTATAC |
| 501 | TCCCTACCTT TTAGGTTCTA AGGCGAGTCG TCCTTCAGTA |
| | AATCTCAGCG |
| 551 | GGAACCGCTA CCTGGTGTTT AGAGACAATG TGAGCCAAGG |
| | TTATGGCGGC |
| 601 | GCCATATCTA CCCACAATCT CACACTCACG ACTCGAGGAC |
| | CTTCGTGTTT |
| 651 | TGAAAATAAT CATGCTTATC ATGACGTGAA TAGTAATGGA |
| | GGAGCCATTG |
| 701 | CCATTGCTCC TGGAGGATCG ATCTCTATAT CCGTGAAAAG |
| | CGGAGATCTC |
| 751 | ATCTTCAAAG GAAATACAGC ATCACAAGAC GGAAATACAA |
| | TACACAACTC |
| 801 | CATCCATCTG CAATCTGGAG CACAGTTTAA GAACCTACGT |
| | GCTGTTTCAG |
| 851 | AATCCGGAGT TTATTTCTAT GATCCTATAA GCCATAGCGA |
| | GTCGCATAAA |
| 901 | ATTACAGATC TTGTAATCAA TGCTCCTGAA GGAAAGGAAA |
| | CTTATGAAGG |
| 951 | AACAATTAGC TTCTCAGGAC TATGCCTGGA TGATCATGAA |
| | GTTTGTGCGG |
| 1001 | AAAATCTTAC TTCCACAATC CTACAAGATG TCACATTAGC |
| | AGGAGGAACT |
| 1051 | CTCTCTCTAT CGGATGGGGT TACCTTGCAA CTGCATTCTT |
| | TTAAGCAGGA |
| 1101 | AGOAAGCTCT ACGCTTACTA TGTCTCCAGG AACCACTCTG |
| | CTCTGCTCAG |
| 1151 | GAGATGCTCG GGTTCAGAAT CTGCACATCC TGATTGAAGA |
| | TACCGACAAC |
| 1201 | TTTGTTCCTG TAAGGATTCG CGCCGAGGAC AAGGATGCTC |
| | TTGTCTCATT |
| 1251 | AGAAAAACTT AAAGTTGCCT TTGAGGCTTA TTGGTCCGTC |
| | TATGACTTTC |
| 1301 | CTCAATTTAA GGAAGCCTTT ACGATTCCTC TTCTTGAACT |
| | TCTAGGGCCT |
| 1351 | TCTTTTGACA GTCTTCTCCT AGGGGAGACC ACTTTGGAGA |
| | GAACCCAAGT |
| 1401 | CACAACAGAG AATGACGCCG TTCGAGGTTT CTGGTCCCTA |
| | AGCTGGGAAG |
| 1451 | AGTACCCCCC TTCTCTGGAT AAAGACAGAA GGATCACACC |
| | AACTAAGAAA |
| 1501 | ACTGTTTTCC TCACTTGGAA TCCTGAGATC ACTTCTACGC |
| | CATAA |

[0475] The PSORT algorithm predicts an outer membrane location (0.922).

[0476] The protein was expressed in E. coli and purified as a as a his-tag product and as a GST-fusion product, as shown in FIG. 26A. The recombinant GST-fusion protein was used to immunise mice, whose sera were used in a Western blot (FIG. 26B).

[0477] These experiments show that cp6735 is a surface-exposed and immunoaccessible protein, and that it is a useful immunogen. These properties are not evident from the sequence alone.

### Example 27

[0478] The following C. pneumoniae protein (PID 4376784) was expressed <SEQ ID 53; cp6784>:

| | |
|---|---|
| 1 | MNRRKARWVV ALFAMTALIS VGCCPWSQAK SRCSIDKYIP |
| | VVNRLLEVCG |
| 51 | LPEAENVEDL IESSSAWVLT PEERFSGBLV SICQVKDEHA |
| | FYNDLSLLHM |
| 101 | TQAVPSYSAT YDCAVVFGGP LPALRQELDD LVREWQRGVR |
| | FKKIVFLCGE |
| 151 | RGRYQSIEEQ EHFFDSRYNP FPTEENWESG NRVTPSSEEE |
| | IAEFVWMQML |
| 201 | LPRAWRDSTS GVRVTFLLMC PEENRVVANR KDTLLLFRSY |
| | QEAFPGRVLF |
| 251 | VSSQPFIGLD ACRVGQFFKG ESYDLAGPGF AQGVLKYHWA |
| | PRICLHTLAE |
| 301 | WLKETNGCLN ISEGCFG* |

[0479] A predicted signal peptide is highlighted.

[0480] The cp6784 nucleotide sequence <SEQ ID 54> is:

| | |
|---|---|
| 1 | ATGAATAGAA GAAAAGCAAG ATGGGTAGTG GCATTGTTCG |
| | CAATGACGGC |
| 51 | GCTCATTTCT GTTGGGTCTT GTCCTTGGTC ACAAGCGAAA |
| | TCAAGATGTT |
| 101 | CTATTGATAA GTATATTCCT GTAGTCAATC GTTTACTAGA |
| | AGTTTGTGGA |
| 151 | CTTCCTGAAG CTGAGAATGT TGAGGATTTA ATCGAGTCCT |
| | CGTCTGCTTG |
| 201 | GGTACTGACT CCTGAAGAAC GTTTTTCTGG AGAGTTAGTC |
| | TCTATCTGTC |
| 251 | AGGTTAAAGA TGAGCATGCT TTCTATAACG ATTTGTCTTT |
| | ATTACATATG |
| 301 | ACTCAGGCTG TGCCTTCGTA TTCTGCAACG TATGATTGTG |
| | CTGTAGTTTT |
| 351 | TGGCGGGCCT TTGCCAGCGC TACGTCAGCG CTTAGATTTT |
| | TTGGTGCGAG |
| 401 | AGTTGCAGCG TCGCGTGCGC TTTAAGAAAA TCGTTTTTCT |
| | ATGTGGAGAG |
| 451 | CGAGGGCGCT ATCAGTCTAT TGAAGAACAA GAGCATTTCT |
| | TTGATTCTCG |
| 501 | GTACAATCCT TTCCCTACTG AAGAGAACTG GGAATCTGGT |
| | AACCGAGTTA |
| 551 | CTCCCTCTTC TGAAGAAGAG ATTGCCAAAT TTGTTTGGAT |
| | GCAAATGCTT |
| 601 | TTACCTAGAG CATGGCGAGA TAGTACTTCA GGAGTCAGAG |
| | TGACATTTCT |
| 651 | TCTAGCAAAG CCAGAGGAAA ATCGTGTGGT TGCGAATCGT |
| | AAGGACACCT |
| 701 | TACTTTTATT CCGTTCTTAT CAAGAAGCGT TTCCGGGACG |
| | CGTGTTATTT |
| 751 | GTAAGTAGTC AACCCTTTAT CGGTTTAGAT GCTTGCAGGG |
| | TCGGGCAGTT |
| 801 | TTTCAAAGGG GAAAGCTATG ATCTGGCTGG ACCTGGATTT |
| | GCTCAAGGAG |
| 851 | TCTTGAAGTA TCATTGGGCT CCAAGGATTT GTCTACATAC |
| | TTTAGCGGAA |
| 901 | TGGTTAAAGG AAACGAACGG CTGCTTAAAT ATTTCAGAGG |
| | GTTGTTTTGG |
| 951 | ATGA |

[0481] The PSORT algorithm predicts a periplasmic location (0.894).

[0482] The protein was expressed in E. coli and purified as a his-tag product and as a GST-fusion product, as shown in FIG. 27A. The recombinant proteins were used to immunise mice, whose sera were used in a Western blot (FIG. 27B). The GST-fusion product was used for FACS analysis (FIG. 27C).

[0483] The cp6784 protein was also identified in the 2D-PAGE experiment (Cpn0498).

[0484] These experiments show that cp6784 is a surface-exposed and immunoaccessible protein, and that it is a useful immunogen. These properties are not evident from the sequence alone.

### Example 28

[0485] The following C. pneumoniae protein (PID 4376960) was expressed <SEQ ID 55; cp6960>:

| | |
|---|---|
| 1 | MNRRWNLVLA TVALLALSVAS CDVRSKDKDK DQGSVEYKD |
| | NKDTNDIELS |
| 51 | DNQKLSRTFG HLLARQLRKS EDMFFDIAEV AKGLQAELVC |
| | KSAPLTETEY |
| 101 | EEKHAEVQKL VFEKKSKENL SLAEKFLKEN SKNAGVVBVQ |
| | PSRLQYKIIK |
| 151 | EGAGKAISGK PSALIMYKGS FINGQVFSSS EGNNEPILLP |
| | LGQTIPGFAL |
| 201 | GKQGMKEGET RVLYIHPDLA YGTAGQLPPN SLLIFEINLI |
| | QASADEVAAV |
| 251 | PQEGNQGE* |

[0486] A predicted signal peptide is highlighted.

[0487] The cp6960 nucleotide sequence <SEQ ID 56> is:

| | |
|---|---|
| 1 | ATGAACAGAC GGTGGAATTT AGTTTTAGCA ACAGTAGCTC |
| | TGGCACTCTC |
| 51 | CGTCGCTTCT TGTGACGTAC GGTCTAAGGA TAAAGACAAG |
| | GATCAGGGGT |
| 101 | CGTTAGTGGA ATATAAAGAT AACAAAGATA CCAATGACAT |
| | AGAATTATCC |
| 151 | GATAATCAAA AGTTATCCAG AACATTTGGT CATTTATTAG |
| | CACOCCAATT |
| 201 | ACGCAAGTCA GAAGATATGT TTTTTGATAT TGCAGAAGTG |
| | GCTAAGGGGT |
| 251 | TGCAGGCGGA ATTGGTTTGT AAAAGTGCTC CTTTAACAGA |
| | AACAGAGTAT |
| 301 | GAAGAAAAAA TGGCTGAAGT ACAGAAGTTG GTTTTTGAAA |
| | AAAAATCAAA |
| 351 | AGAAAATCTT TCATTGGCAG AAAAATTCTT AAAAGAAAAT |
| | AGCAAGAACG |
| 401 | CTGGTGTTGT TGAAGTGCAA CCAAGTAAAT TGCAATACAA |
| | AATTATTAAA |
| 451 | GAAGGTGCAG GGAAAGCAAT TTCAGGTAAA CCTTCAGCTC |
| | TATTGCACTA |
| 501 | CAAGGGTTCC TTCATCAATG GCCAAGTATT TAGCAGTTCA |
| | GAAGGCAACA |
| 551 | ATGAGCCTAT CTTGCTTCCT CTAGGCCAAA CAATTCCTGG |
| | TTTTGCTTTA |
| 601 | GGTATGCAGG GCATGAAAGA AGGAGAAACT CGAGTTCTCT |
| | ACATCCATCC |
| 651 | TGATCTTGCT TACGGAACCG CAGGACAACT TCCTCCAAAC |
| | TCTTTATTAA |
| 701 | TTTTTGAAAT TAACTTGATT CAGGCTTCAG CAGATGAAGT |
| | TGCTGCTGTA |
| 751 | CCCCAAGAAG GAAATCAAGG TGAATGA |

[0488] The PSORT algorithm predicts periplasmic space location (0.930).

[0489] The protein was expressed in E. coli and purified as a his-tag product and as a GST-fusion product, as shown in FIG. 28A. The recombinant proteins were used to immunise mice, whose sera were used in a Western blot (FIG. 28B) and for FACS analysis (FIG. 28C).

[0490] The cp6960 protein was also identified in the 2D-PAGE experiment.

[0491] These experiments show that cp6960 is a surface-exposed and immunoaccessible protein, and that it is a useful immunogen. These properties are not evident from the sequence alone.

### Example 29

[0492] The following C. pneumoniae protein (PID 4376968) was expressed <SEQ ID 57; cp6968>:

| | |
|---|---|
| 1 | MKFLLYVPLL LVLVSTGCDA KPVSFEPFSG KLSTQRFEPQ |
| | HSAEEYSFSQG |
| 51 | QEFLKKGNFR KALLCFGIIT HHFPRDILRN QAQYLIGVCY |
| | FTQDHPDLAD |
| 101 | KAFASYLQLP DAEYSEELFQ MKYAIAQRFA QGKRKRICRL |
| | EGFPKLMNAD |
| 151 | EDALRXYDEI LTAPPSKDLG AQALYSKALL LIVKNDLTEA |
| | TKTLKKLTLQ |
| 201 | FPLHILSSEA FVRLSEIYLQ QAKKEPHNLQ YLHFAKLNEE |
| | AMKKQHPNHP |
| 251 | LNEVVSANVG AMREHYARGL YATGRFYEKK KKAEAANIYY |
| | RTAITNYPDT |
| 301 | LLVAKCQKRL DRISKHTS* |

[0493] A predicted signal peptide is highlighted.

[0494] The cp6968 nucleotide sequence <SEQ ID 58> is:

| | |
|---|---|
| 1 | ATGAAATTTC TATTATACGT TCCACTTCTT CTTGTTCTCG |
| | TATCTACGGG |
| 51 | GTGCGATGCA AAACCTGTTT CTTTTGAGCC CTPTTCAGGA |
| | AAGGTTTCCA |
| 101 | CCCAGCGTTT TGAGCCTCAG CACTCTGCTG AAGAATATTT |
| | TTCTCAGGGA |
| 151 | CAGGAATTCT TAAAAAAACG AAATTTCAGA AAAGCTTTAC |
| | TATGCTTTGG |
| 201 | AATCATTACG CATCACTTCC CTAGGGACAT CTTGCGTAAT |
| | CAAGCACAGT |
| 251 | ATCTTATAGG AGTCTGTTAC TTCACGCAGG ATCACCCAGA |
| | TTTAGCAGAC |
| 301 | AAGGCATTTG CATCTTACTT ACAACTTCCT GATGCGGAGT |
| | ACTCTGAAGA |
| 351 | GTTGTTCCAU ATGAAATATG CGATTGCTCA AAGATTTGCT |
| | CAAGGGAAGC |
| 401 | GTAAACGGAT TTGTCGATTA GAGGGCTTCC CAAAACTAAT |
| | GAATGCTGAT |
| 451 | GAAGATGCGC TACGCATTTA TGACGAGATT CTAACAGCGT |
| | TTCCTAGTAA |
| 501 | AGACTTTGGA GCTCAGGCCC TCTATAGTAA AGCTGCGTTA |
| | CTTATTGTAA |
| 551 | AAAACGATCT TACAGAAGCC ACCAAAACCT TAAAAAAACT |
| | CACGTTACAA |
| 601 | TTTCCTCTAC ATATTTTATC TTCAGGGGCC TTTGTACGTT |
| | TATCGGAAAA |
| 651 | CTATTTACAG CAAGCTAAGA AAGAGCCTCA CAATCTTCAA |
| | TATCTTCATT |
| 701 | TTGCAAAGCT TAATGAAGAG GCAATGAAAA AGCAGCATCC |
| | TAACCATCCT |
| 751 | CTGAATGAGG TTGTTTCTGC TAATGTTGGA GCTATGCGGG |
| | AACATTATGC |
| 801 | TCGAGGTTTG TATOCCACAG GTCGTTTCTA TGAGAAGAAG |
| | AAAAAAGCCG |
| 851 | AGGCTGCGAA TATCTATTAC CGCACTGCGA TTACAAACTA |
| | CCCAGACACT |
| 901 | TTATTAGTGG CTAAATGTCA AAAGCGTCTA GATAGAATAT |
| | CTAAGCATAC |
| 951 | TTCCTAA |

[0495] The PSORT algorithm predicts an inner membrane location (0.790).

[0496] The protein was expressed in E. coli and purified as a his-tag product and as a GST-fusion product, as shown in FIG. 29A. The recombinant GST-fusion was used to immunise mice, whose sera were used in a Western blot (FIG. 29B) and for FACS analysis (FIG. 29C).

[0497] This protein also showed good cross-reactivity with human sera, including sera from patients with pneumonitis.

[0498] These experiments show that cp6968 is a surface-exposed and immunoaccessible protein, and that it is a useful immunogen. These properties are not evident from the sequence alone.

### Example 30

[0499] The following C. pneumoniae protein (PID 4376998) was expressed <SEQ ID 59; cp6998>:

| | |
|---|---|
| 1 | MKKLLKSALL SAAFAGSVGS LQALLPVGNPS DPSLLIDGTI WEGAAGDPCD |
| 51 | PCATWCDAIS LRAGFYGDYV FDRILKVDAP KTFSMGAKPT GSAAANYTTA |
| 101 | VDRPNPAYNK HLHDAEWFTN AGFIALNIWD RFDVFCTLGA SNGYIRGNST |
| 151 | AFNLVGLFGV KGTTVNANEL PNVSLSNGVV ELYTDTSFSW SVGARGALWE |
| 201 | CGCATLGAEF QYAQSKPKVE BLNVICNVSQ FSVNKPKGYK GVAFPLPTDA |
| 251 | GVATATGTKS ATINYHEWQV GASLSYRLNS LVPYIGVQWS RATFDADNIR |
| 301 | IAQPKLPTAV LNLTAWNPSL LGNATALSTT DSFSDFMQIV SCQINKFKSR |
| 351 | KACGVTVGAT LVDADKWSLT AEARLINERA AHVSGQFRF* |

[0500] A predicted signal peptide is highlighted.

[0501] The cp6998 nucleotide sequence <SEQ ID 60> is:

| | |
|---|---|
| 1 | ATGAAAAAAC TCTTAAAGTC GGCGTTATTA TCCGCCGCAT TTGCTGGTTC |
| 51 | TGTTGGCTCC TTACAAGCCT TGCCTGTAGG GAACCCTTCT GATCCAAGCT |
| 101 | TATTAATTGA TGGTACAATA TGGGAAGGTG CTGCAGGAGA TCCTTGCGAT |
| 151 | CCTTGCGCTA CTTGGTGCGA CGCTATTAGC TTACGTGCTG GATTTTACGG |
| 201 | AGACTATGTT TTCGACCGTA TCTTAAAAGT AGATGCACCT AAAACATTTT |
| 251 | CTATGGGAGC CAAGCCTACT GGATCCGCTG CTGCAAACTA TACTACTGCC |
| 301 | GTAGATAGAC CTAACCCGGC CTACAATAAG CATTTACACG ATGCAGAGTG |
| 351 | GTTCACTAAT GCAGGCTTCA TTGCCTTAAA CATTTGGGAT CGCTTTGATG |
| 401 | TTTTCTGTAC TTTAGGAGCT TCTAATGGTT ACATTAGAGG AAACTCTACA |
| 451 | GCGTTCAATC TCGTTGGTTT AATCGGAGTT AAAGGTACTA CTGTAAATGC |
| 501 | AAATGAACTA CCAAACGTTT CTTTAAGTAA CGGAGTTGTT GAACTTTACA |
| 551 | CAGACACCTC TTTCTCTTGG AGCGTAGGCG CTCGTGGAGC CTTATGGGAA |
| 601 | TGCGGTTGTG CAACTTTGGG AGCTGAATTC CAATATGCAC AGTCCAAACC |
| 651 | TAAAGTTGAA GAACTTAATG TGATCTGTAA CGTATCGCAA TTCTCTGTAA |
| 701 | ACAAACCCAA GGGCTATAAA GGCGTTGCTT TCCCCTTGCC AACAGACGCT |
| 751 | GGCGTAGCAA CAGCTACTGG AACAAAGTCT GCGACCATCA ATTATCATGA |
| 801 | ATGGCAAGTA GGAGCCTCTC TATCTTACAG ACTAAACTCT TTAGTGCCAT |
| 851 | ACATTGGAGT ACAATGGTCT CGAGCAACTT TTGATGCTGA TAACATCCGC |
| 901 | ATTGCTCAGC CAAAACTACC TACAGCTGTT TTAAACTTAA CTGCATGGAA |
| 951 | CCCTTCTTTA CTAGGAAATG CCACAGCATT GTCTACTACT GATTCGTTCT |
| 1001 | CAGACTTCAT GCAAATTGTT TCCTGTCAGA TCAACAAGTT TAAATCTAGA |
| 1051 | AAAGCTTGTG GAGTTACTCT AGGAGTTACT TTAGTTGATG CTGATAAATG |
| 1101 | GTCACTTACT GCAGAAGCTC GTTTAATTAA CGAGAGAGCT CCTCACCTAT |
| 1151 | CTGGTCAGTT CAGATTCTAA |

[0502] The PSORT algorithm predicts an outer membrane location (0.707).

[0503] The protein was expressed in E. coli and purified as a GST-fusion (FIG. 30A) and as a his-tag product. The recombinant GST-fusion protein was used to immunise mice, whose sera were used in a Western blot (FIG. 30B) and for FACS analysis (FIG. 30C).

[0504] The cp6998 protein was also identified in the 2D-PAGE experiment (Cpn0695) and showed good cross-reactivity with human sera, including sera from patients with pneumonitis.

[0505] These experiments show that cp6998 is a surface-exposed and immunoaccessible protein, and that it is a useful immunogen. These properties are not evident from the sequence alone.

### Example 31

[0506] The following C. pneumoniae protein (PID 4377102) was expressed <SEQ ID 61; cp7102>:

| | |
|---|---|
| 1 | MKHTFTKRVL FFFFLVIPIP LLLNLMVVGF FSFSAAKANL VQVLHTRATN |
| 51 | LSIEFEKKLT IHKLFLDRLA NTLALKSYAS PSAEPYAQAY NEMMALSNTD |
| 101 | FSLCLIDPFD GSVRTKNPGD PFIRYLKQHP EMKKKLSAAV GKAFLLTIPG |
| 151 | KPLLHYLILV EDVASWDSTT TSGLLVSFYP MSFLQKDLFQ SLHITKGNIC |
| 201 | LVNKYGEVLF CAQDSESSFV FSLDLPNLPQ FQARSPSAIE IEKASGILGG |
| 251 | ENLITVSINK KRYLGLVLNK IPIQGTYTLS LVPVSDLIQS ALKVPLNICF |
| 301 | PYVLAFLLMW WIFSKTNTKL NKPLQELTFC MEAAWRGNHN VREEPQPYGY |
| 351 | EFNELGNTFN CTLLLLLNIS EKADIDYHSG EKLQKELGIL SSLQSALLSP |
| 401 | DFPTFPKVTF SSQHLRRRQL SGHFNGWTVQ DGGDTLLGII GLAGDIGLPS |
| 451 | YLYALSARSL FLAYASSDVS LQKISKDTAD SFSKTTEGNE AVVAMTFIKY |
| 501 | VEKDRSLELL SLSEGAPTMF LQRGESFVRL PLETHQALQP GDRLICLTGG |
| 551 | EDILKYFSQL PIEELLKDPL NPLNTENLID SLTMMLNNET EHSADGTLTI |
| 601 | LSES* |

[0507] A predicted signal peptide is highlighted.

[0508] The cp7102 nucleotide sequence <SEQ ID 62> is:

| | |
|---|---|
| 1 | ATGAAACATA CCTTTACCAA GCGTGTTCTA TTTTTTTTCT TTTTAGTGAT |
| 51 | TCCCATTCCC CTACTCCTCA ATCTTATGGT CGTAGGTTTT TTCTCADTTT |
| 101 | CTGCCGCTAA AGCAAATTTA GTACAGGTCC TCCATACCCG TGCTACGAAC |
| 151 | TTAAGTATAG AATTCGAAAA AAAACTGACG ATACACAAGC TTTTCCTCGA |
| 201 | TAGACTTGCC AACACATTAG CCTTAAAATC CTATGCATCT CCTTCTGCAG |
| 251 | AQCCCTATGC ACAGGCATAC AATGAGATGA TGGCACTCTC CAATACAGAC |
| 301 | TTTTCCTTAT GCCTTATAGA TCCCTTTGAT GGATCTGTAA GGACGAAAAA |
| 351 | TCCTGGAGAC CCTTTCATTC GCTATCTAAA ACAGCATCCT GAAATGAAGA |
| 401 | AAAAGCTATC CGCAGCTGTA GGGAAAGCCT TTTTATTGAC CATTCCAGGT |
| 451 | AAACCACTTT TACATTATCT TATTCTAGTT GAAGATGTCG CATCTTGGGA |
| 501 | TTCTACAACG ACTTCAGGAC TGCTTGTAAG TTTCTATCCC ATGTCTTTTT |
| 551 | TACAGAAAGA TTTATTCCAA TCCTTACACA TCACCAAAGG AAATATCTGC |
| 601 | CTTGTAAATA AGTATGGCGA GGTCCTCTTC TGTGCTCAGG ACAGTGAATC |
| 651 | TTCTTTTGTA TTTTCTCTAG ATCTCCCTAA TTTACCGCAA TTCCAAGCAA |
| 701 | GAAGCCCCTC TGCCATAGAA ATTGAGAAAG CTTCTGGAAT TCTTGGTGGG |
| 751 | GAGAACCTAA TCACAGTGAG TATCAACAAG AAACGCTACC TAGGATTGGT |
| 801 | ACTGAATAAA ATTCCTATCC AAGGGACCTA CACTCTATCT TTAGTTCCAG |
| 851 | TTTCTGATCT CATCCAATCC GCCTTGAAAG TTCCTCTCAA TATTTGTTTT |
| 901 | TTCTATGTAC TTGCTTTCCT CCTCATGTGG TGGATTTTCT CTAAGATCAA |
| 951 | CACCAAACTT AACAAGCCTC TTCAAGAACT GACCTTCTGT ATGGAAGCTG |
| 1001 | CCTGGCGAGG AAACCATAAC GTGAGGTTTG AACCCCAGCC TTACGGTTAT |
| 1051 | GAATTCAATG AACTAGGAAA TATTTTCAAT TGCACTCTCC TACTCTTATT |
| 1101 | GAATTCCATT GAGAAAGCAG ATATCGATTA CCATTCAGGC GAAAAATTAC |
| 1151 | AAAAAGAATT AGGGATTTPA TCTTCACTAC AAACTGCGTT ACTAAGTCCG |
| 1201 | GATTTCCCTA CGTTCCCTAA AGTTACCTTT AGTTCCCAAC ATCTCCGGAG |
| 1251 | AAGGCAACTT TCCGGTCATT TTAATGGTTG GACAGTTCAA GATGGTGGCG |
| 1301 | ATACCCTTTT AGGGATCATA GGGCTCGCTG GCGATATTGG TCTTCCTTCC |
| 1351 | TATCTCTATG CTTTATCCGC ACGGAGTCTT TTTCTTGCCT ATGCTTCCTC |
| 1401 | GGACGTTTCG TTACAAAAAA TCAGCAAGGA TACTGCCGAC AGCTTCTCAA |
| 1451 | AAACAACAGA AGGCAATGAG GCTGTAGTTG CTATGACTTT CATTAAATAT |
| 1501 | GTAGAAAAAG ATCGATCTCT AGAGCTCCTC TCGTTAAGCG AGGGAGCTCC |
| 1551 | TACCATGTTT CTACAACGAG GAGAATCTTT CGTACGTCTC CCCTTAGAGA |
| 1601 | CTCACCAAGC TCTACAGCCT GGAGATCGGT TGATCTGCCT CACTGGAGGA |
| 1651 | GAAGACATCC TCAAGTACTT TTCTCAGCTT CCTATTGAAG AGCTCTTAAA |
| 1701 | AGATCCTTTA AACCCTCTAA ATACAGAGAA TCTTATTGAT TCTCTAACCA |
| 1751 | TGATGTTAAA CAACGAAACC GAACATTCTG CAGATGGAAC TCTGACCATC |
| 1801 | CTTTCATTTT CATAA |

[0509] The PSORT algorithm predicts an inner membrane location (0.338).

[0510] The protein was expressed in E. coli and purified as a his-tag product and as a GST-fusion product. The purified GST-fusion product is shown in FIG. 31A. The recombinant GST-fusion protein was used to immunise mice, whose sera were used in a Western blot and for FACS analysis (FIG. 31B).

[0511] These experiments show that cp7102 is a surface-exposed and immunoaccessible protein, and that it is a useful immunogen. These properties are not evident from the sequence alone.

### Example 32

[0512] The following C. pneumoniae protein (PID 4377106) was expressed <SEQ ID 63; cp7106>:

| | |
|---|---|
| 1 | MKDLGTLGGT SSTAKTVSPD GKVIMGRSQI ADGSWHAFMC HTDFSSNNVL |
| 51 | FDLDNTYKTL RENGRQLNSI FNLQNMMLQR ASDHEFTEPG RSNIALGAGL |
| 101 | YVNALQNLPS NLAAQYFGIA YKIRPKYRLG VFLDHNFSSH VPNNFNVSHN |
| 151 | RLWNGAFIGW QDSDALGSSV KVSFGYGKQK ATITREQLEN TEAGSGESHF |
| 201 | BGVAAQIEGR YGKSLGGHVR VQPFLGLQFV HITRKEYTEN AVQFPVHYDP |
| 251 | IDYSTGVVYL GIGSHIALVD SLHVGTPMGM EQWFAAHTDR FSGSIASIGN |
| 301 | FVFEKLDVTH TRAFAEMRVN YELPYLQSLN LILRVNQQPL QGVMGFSSDL |
| 351 | RYALGF* |

[0513] The cp7106 nucleotide sequence <SEQ ID 64> is:

| | |
|---|---|
| 1 | ATGAAAGATT TGGGGACTCT TGGGGGTACC TCTTCTACAG CAAAAACAGT |
| 51 | GTCCCCAGAT GGTAAAGTGA TCATGGGTAG ATCACAAATT GCTGATGGCA |
| 101 | GTTGGCACGC ATTTATGTGT CATACGGATT TCTCCTCTAA TAATGTACTC |
| 151 | TTTGATCTCG ATAATACGTA TAAAACTCTA AGAGAAAATG GCCGTCAGCT |
| 201 | AAATTCCATA TTCAACCTAC AAAATATGAT GTTACAGAGA GCCTCAGATC |
| 251 | ATGAGTTCAC AGAGTTTGGA AGGAGTAACA TCGCTCTTGG TGCCGGGCTT |
| 301 | TATGTGAATG CCTTGCAGAA TCTCCCTAGC AATTTAGCAG CACAATATTT |
| 351 | TGGATTCGCA TACAAAATAC GTCCTAAATA TCGTTTGGGG GTGTTTTTGG |
| 401 | ACCATAATTT CAGCTCCCAC GTTCCTAATA ATTTTAACGT AAGCCACAAT |
| 451 | AGACTCTGGA TGGGAGCCTT TATTGGATGG CAGGATTCTG ATGCTCTAGG |
| 501 | ATCTAGTGTC AAGGTGTCTT TCGGATATGG AAAACAAAAA GCCACGATTA |
| 551 | CAAGAGAGCA ATTAGAGAAT ACAGAAGCCG GGAGTGGGGA GAGCCATTTT |
| 601 | GAAGGGGTCG CTGCTCAGAT AGAAGGGCCG TATGGTAAGA GCCTCGGAGG |
| 651 | ACATGTCAGG GTCCAGCCTT TCCTAGGACT GCAGTTTGTC CACATTACAA |
| 701 | GGAAAGAATA TACCGAAAAT GCAGTGCAAT TPCCTGTACA CTATGATCCT |
| 751 | ATAGACTATT CTACAGGTGT AGTGTATTTA GGAATTGGAT CTCATATTGC |
| 801 | ACTTGTAGAT TCTTTACATG TAGGCACACG CATGGGAATG GAGCAAAACT |
| 851 | TTGCAGCCCA TACGGACAGG TTCTCAGGAT CTATAGCGTC TATTGGAAAC |
| 901 | TTTGTGTTTG AAAAGCTTGA TGTGACTCAC ACAAGGGCAT TTGCGGAAAT |
| 951 | GCGTGTCAAC TATGAGCTTC CCTATCTACA GTCTCTGAAT CTTATTCTAC |
| 1001 | GAGTTAATCA ACAGCCTCTA CAAGGGGTTA TGGGATTTTC CAGTGATCTT |
| 1051 | AGGTATGCCT TAGGATTCTA A |

[0514] The PSORT algorithm predicts a cytoplasmic location (0.224).

[0515] The protein was expressed in E. coli and purified as a his-tag product and as a GST-fusion product. The purified GST-fusion product is shown in FIG. 32A. The recombinant GST-fusion protein was used to immunise mice, whose sera were used in a Western blot (FIG. 32B) and for FACS analysis (FIG. 32C).

[0516] This protein also showed very good cross-reactivity with human sera, including sera from patients with pneumonitis.

[0517] These experiments show that cp7106 is a surface-exposed and immunoaccessible protein, and that it is a useful immunogen. These properties are not evident from the sequence alone.

### Example 33

[0518] The following C. pneumoniae protein (PID 4377228) was expressed <SEQ ID 65; cp7228>:

| | |
|---|---|
| 1 | MTAVLILTSF PSEESARSLA RHLITERLAS CVHVFPKGTS TYLWEGKLCE |
| 51 | SEEHHIQIKS IDIRFSEICL AIQEFSGYEV PEVLIJFPIEN GDPRYLNWLT |
| 101 | ILSYPEKPPL SD* |

[0519] The cp7228 nucleotide sequence <SEQ ID 66> is:

| | |
|---|---|
| 1 | ATGACTGCTG TTCTTATTCT TACATCTTTC CCTTCGGAGG AAAGTGCTCG |
| 51 | CTCCTTAGCT AGACATCTGA TTACAGAGCG TCTTGCTTCC TGTGTGCATG |
| 101 | TATTCCCTAA AGGCACATCG ACATATCTAT GGGAAGGCAA GCTATGTGAG |
| 151 | TCTGAAGAAC ATCATATACA AATCAAATCG ATAGACATAC GCTTCTCGGA |
| 201 | AATTTGTCTT GCTATTCAGG AGTTCTCTGG CTATGAGGTT CCTGAAGTCT |
| 251 | TACTATTTCC TATTGAAAAT GGGGATCCGA GGTACTTGAA TTGGTTAACG |
| 301 | ATTCTCAGCT ATCCAGAGAA GCCTCCGCTT TCAGATTAG |

[0520] The PSORT algorithm predicts an inner membrane location (0.040).

[0521] The protein was expressed in E. coli and purified as a his-tag product and as a GST-fusion product, as shown in FIG. 33A (his-tag=left-hand arrow, GST=right-hand arrow). The proteins were used to immunise mice, whose sera were used in a Western blot (FIG. 33B) and FACS analysis.

[0522] These experiments show that cp7228 is a surface-exposed and immunoaccessible protein, and that it is a useful immunogen. These properties are not evident from the sequence alone.

### Example 34

[0523] The following C. pneumoniae protein (PID 4377170) was expressed <SEQ ID 67; cp7170>:

| | |
|---|---|
| 1 | MNSKMLKHLR LATLSFSMFF GIVSSPAVYALGAGNPAAPV LPGVNPEQTG |
| 51 | WCAPQLCNSY DLFAALAGSL KPGFYGDYVF SESAMITNVP VITSVTTSGT |
| 101 | GTTPTITSTT KNVDFDLNNS SISSSCVFAT XALQETSPAA IPLLDIAPWA |
| 151 | RVGGLKQYYR LPLNAYRDFT SNPLNAESEV TDGLIEVQSD YGIVWGLSLQ |
| 201 | KVLWKDGVSF VGVSADYRHG SSPINYXIVY NKANPEIYED ATDGNLSYKE |
| 251 | WSASIGISTY LNDYVLPYAS VSIGNTSRRA PSDSFTELEK QFTNFKFKIR |
| 301 | KITNFDRVNF CFGTTCCISN NFYYSVEGRW GYQRAINITS GLQE* |

[0524] A predicted signal peptide is highlighted.

[0525] The cp7170 nucleotide sequence <SEQ ID 68> is:

| | |
|---|---|
| 1 | ATGAATAGCA AGATGCTAAA ACATTTACGT TTAGCAACCC TTTCCTTCTC |
| 51 | TATGTTCTTC GGGATTGTAT CTTCTCCCGC AGTATATGCC CTAGGGGCTG |
| 101 | GAAACCCTGC AGCTCCAGTA CTCCCAGGTG TGAATCCTGA GCAAACGGGA |
| 151 | TGGTGTGCCT TCCAACTTTG TAATAGTTAC GATCTTTTTG CTGCTCTTGC |
| 201 | AGGAAGCCTC AAATTTGGGT TCTATGGAGA TTATGTCTTC TCAGAAAGTG |
| 251 | CCCATATTAC CAATGTCCCT GTCATTACCT CCGTTACGAC TTCAGGCACA |
| 301 | GGAACAACGC CAACCATTAC CTCTACAACT AAAAACGTAG ACTTTGATCT |
| 351 | TAACAACAGC TCCATCAGCT CGAGCTGTGT TTTTGCAACC ATAGCTCTAC |
| 401 | AGGAAACATC CCCAGCTGCC ATTCCCCTTT TAGATATAGC CTTCACTGCA |
| 451 | CGTGTCGGAG GACTTAAGCA GTACTACCGC CTCCCTCTCA ATGCTTACAG |
| 501 | AGACTTCACT TCAAATCCTT TAAATGCAGA ATCTGAAGTT ACCCATGGTC |
| 551 | TCATTGAAGT CCAGTCAGAC TATGGAATTC TCTGGGCTCT GAGGTTACAA |
| 601 | AAAGTATTGT GGAAAGATGG AGTGTCTTTT GTAGGGGTGA GCGCTGACTA |
| 651 | CCGTCACGGT TCCAGTCCCA TCAACTATAT CATCGTTTAC AACAAGGCCA |
| 701 | ACCCCGAGAT CTATTTCGAT GCTACTGATG GAAACCTAAG CTATAAAGAA |
| 751 | TGGTCTGCAA GCATCGGCAT CTCTACGTAT CTTAATGACT ATGTGCTTCC |
| 801 | CTATGCATCC GTATCTATAG GAAATACTTC AAGAAAAGCT CCTTCTGATA |
| 851 | GCTTCACAGA ACTCGAAAAC CAATTTACGA ATTTTAAATT TAAAATTCGT |
| 901 | AAAATCACAA ACTTCGACAG AGTAAACTTC TGCTTCGGAA CTACCTGCTG |
| 951 | CATCDCAAAT AACTTCTACT ATAGTGTAGA AGGCCGTTGG GGATATCAGC |
| 1001 | GTGCTATCAA CATTACGTCA GGTCTGCAGT TTTAG |

[0526] The PSORT algorithm predicts a bacterial outer membrane location (0.936).

[0527] The protein was expressed in E. coli and purified as a his-tag product and as a GST-fusion product. The purified GST-fusion product is shown in FIG. 34A. The GST-fusion protein was used to immunise mice, whose sera were used in a Western blot (34B) and for FACS analysis (34C).

[0528] The cp7170 protein was also identified in the 2D-PAGE experiment (Cpn0854).

[0529] These experiments show that cp7170 is a surface-exposed and immunoaccessible protein, and that it is a useful immunogen. These properties are not evident from the sequence alone.

### Example 35

[0530] The following C. pneumoniae protein (PID 4377072) was expressed <SEQ ID 69; cp7072>:

| | |
|---|---|
| 1 | MDIKKLFCLF LCSSLIAMSPIYGKTGDYEK LTLTGINIID RNGLSETICS |
| 51 | KEKLKKYThV DFLAPQPYQK VMRMYKNKRG DNVSCLTAYH TNGQIKQYLE |
| 101 | CLNNRAYGRY REWHVNGNIK IQAEVIGGIA DLIHPSAEGW LFDQTTFAYN |
| 151 | DEGXLEAAIV YEKGLLEGSS VYYHTNGNIW KECPYHKGVP QGKFLTYTSS |
| 201 | GKLLKEQNYQ QGKRHGLSIR YSEDSEEDVL AWEEYHEGRL LKAEYLDPQT |
| 251 | HEIYATIHEG NGIQAIYGKY AVIETRAFYR GEPYGKVTRF DNSGTQIVQT |
| 301 | YNLLQGAKHG EEDTFYPETG KPKLLLNWHE GILNGIVKTW YPGGTLESCK |
| 351 | ELVNNKKSGL LTXYYPEGQI HATEEYDNDL LIKGEYFRPG DRHPYSKIDR |
| 401 | GCGTAVFFSS AGTITKKIPY QDGKPLIN* |

[0531] A predicted signal peptide is highlighted.

[0532] The cp7072 nucleotide sequence <SEQ ID 70 is:

| | |
|---|---|
| 1 | ATGGATATAA AAAAACTCTT TTGCTTATTT CTATGTTCTT CTCTAATTGC |
| 51 | CATGAGTCCC ATTTATGGGA AAACAGGTGA CTATGAGAAA CTCACCCTTA |
| 101 | CAGGGAPCAA TATCATTGAT AGAAACGGCC TGTCAGAAAC TATTTGCTCT |
| 151 | AAAGAGAAGC TAAAGAAATA CACCAAGGTA GACTTTCTTG CTCCCCAGCC |
| 201 | CTATCAAAAG GTCATGAGGA TGTATAAAAA CAAACGCGGA GATAACGTTT |
| 251 | CTTGTTTAAC AGCCTATCAC ACTAACGGGC AAATTAAGCA GTACCTGGAG |
| 301 | TGTCTCAATA ATCGTGCTTA TGGAAGATAT CGTGAATGGC ACGTCAACGG |
| 351 | GAATATCAAA ATCCAAGCTG AGGTTATCGG AGGTATTGCG GATCTTCATC |
| 401 | CCTCAGCAGA GTCTGGCTGG CTATTTGATC AAACTACATT TGCCTATAAT |
| 451 | GATGAAGGTA TCTTAGAAGC CGCTATCGTC TATGAAAAAG GGCTGCTCGA |
| 501 | AGGATCTTCG GTGTATTACC ATACTAATGG GAATATTTGG AAAGAGTGTC |
| 551 | CCTATCATAA GGGAGTTCCT CAAGGTAAAT TCCTGACATA CACATCTTCG |
| 601 | GGGAAACTGC TCAAAGAACA GAATTACCAA CAAGGCAAAA GACACGGTCT |
| 651 | TTCGATTCGC TACAGCGAAG ATTCCGAAGA AGATGTTTTA GCCTGGGAAG |
| 701 | AATATCATGA GGGACGACTC CTAAAAGCAG AGTACTTAGA TCCTCAAACT |
| 751 | CACGAAATCT ATGCGACTAT ACACGAAGGG AACGGCATTC AAGCAATCTA |
| 801 | CGGCAAGTAT GCCGTTATAG AAACTAGGGC ATTTTACCGA GGGGAACCTT |
| 851 | ATGGAAAAGT TACCAGATTC GACAACTCCG GAACACAGAT TGTCCAAACG |
| 901 | TATAACCTTT TGCAAGGCGC GAAGCACGGA GAAGAATTTT TCTTTTATCC |
| 951 | TGAGACAGGG AAACCCAAGC TGCTTCTTAA TTGGCATGAA GGAATTTTAA |
| 1001 | ATGGGATAGT AAAAACTTGG TATCCCGGAG GAACCTTAGA AAGTTGTAAA |
| 1051 | GAACTCGTAA ATAACAAAAA ATCCGGGTTA CTGACCATTT ACTACCCTGA |
| 1101 | AGGACAGATC ATGGCGACCG AAGAGTATGA TAATGATCTT CTAATTAAAG |
| 1151 | GAGAGTACTT CCGCCCTGGA GACCGTCATC CCTACTCTAA AATAGATCGT |
| 1201 | GGTTGTGGGA CTGCAGTATT TTTCTCGTCG GCGGGAACTA TTACTAAAAA |
| 1251 | AATCCCCTAT CAGGACGGCA AACCTTTGCT CAACTAG |

[0533] The PSORT algorithm predicts a periplasmic location (0.688).

[0534] The protein was expressed in E. coli and purified as a his-tag product (FIG. 35A) and as a GST-fusion product (FIG. 35B). The recombinant his-tag protein was used to immunise mice, whose sera were used in a Western blot (FIG. 35C) and for FACS analysis.

[0535] These experiments show that cp7072 is a useful immunogen. These properties are not evident from the sequence alone.

### Example 36

[0536] The following C. pneumoniae protein (PID 4376879) was expressed <SEQ ID 71; cp6879>:

| | |
|---|---|
| 1 | MATPAQKSPT FQDPSFVREL GSNHPVFSPL TLEERGEMAI ARVQQCGWNH |
| 51 | TIVKVSLIIL ALLTILGGGL LVGLLPAVPH FIGTGLIALG AVIFALALIL |
| 101 | CLYDSQGLPE ELPPVPEPQQ IQIEDLRNET REVLEGTLLE VLLKDRDAIW |
| 151 | PAVPQVVVDC EKRLGMLDRK LRREEEILYR STAHLKDEER YEFLLELLEM |
| 201 | RSLVADRLEE NRRSYERFVQ GIMTVRSEEG EKEISRLQDL ISLQQQTVQD |
| 251 | LRSRIDDEQK RCWTALQRIN QSQKDIQRAH DREASQRACE GTEMDCAERQ |
| 301 | QLEKDLRRQL KSMQEWIEMR GTIHQQEKAW RKQNAKLERL QEDLRLTGIA |
| 351 | PDEQSLEYRE YKEKYLSQXL DMQKILQEVN AEKSEKACLE SLVHDYEKQL |
| 401 | EQKJWILKKA AAVWEEELGK QQQEDYEQTQ EIEPLSTFIL EYQDSLREAE |
| 451 | KVEKDFQELQ QRYSRLQEEK QVKEKILEES MNHFADLFEK AQKENMAYKK |
| 501 | KLADLEGAAA PTEIGEDDDW VLTDSASLSQ KKIRELVEEN QELLKALAFK |
| 551 | SNELTQLVAD AVEAEKEISK LREHIEEQKE GLRALDKMHA QAIKDCEAAQ |
| 601 | RKCCDLESLL SPVREDAGMR FELEVELQRL QEENAQLRAE VERLEQEQFQ |
| 651 | G* |

[0537] The cp6879 nucleotide sequence <SEQ ID 72> is:

| | |
|---|---|
| 1 | ATGGCAACAC CCGCTCAAAA ATCCCCTACA TTTCAAGATC CTAGTTTTGT |
| 51 | AAGAGAGCTA GGCAGTAACC ACCCTGTCTT TTCCCCGCTA ACGCTTGAGG |
| 101 | AAAGAGGGGA GATGGCAATA GCTCGAGTCC AGCAGTGTGG ATGGAATCAT |
| 151 | ACAATTGTTA AGGTAAGTCT TATTATTCTT GCTCTTCTTA CTATPTTAGG |
| 201 | GGGAGGATTA CTCGTAGGAT TGCTGCCAGC AGTTCCTATG TTTATTGGAA |
| 251 | CAGGTCTGAT TGCTTTGGGA GCCGTTATAT TTGCTTTGGC TTTGATTTTA |
| 301 | TGTCTTTATG ATTCTCAGGG CCTTCCTGAG GAACTCCCTC CGGTTCCTGA |
| 351 | ACCACAACAA ATTCAGATTG AAGATTTAAG AAACGAGACC AGAGAAGTTC |
| 401 | TTGAAGGGAC TCTTTTAGAG GTTCTCTTAA AGGATAGAGA CGCTAAGGAC |
| 451 | CCTGCGGTGC CCCAGGTGGT TGTAGACTGT GAAAAGCGTC TTGGAATGTT |
| 501 | GGATCGTAAG CTGCGACGTG AAGAGGAGAT TCTGTATCGC TCGACGGCCC |
| 551 | ATCTTAAAGA CGAGGAAAGG TATGAGTTCT TGCTGGAGCT CTTGGAAATG |
| 601 | CGTAGTCTGG TTGCCGATCG GCTAGAATTT AACCGTAGAA GTTATGAGCG |
| 651 | ATTTGTTCAA GGAATTATGA CAGTTAGATC AGAGGAGGGG GAAAAAGAGA |
| 701 | TTTCTCGTCT ACAAGATCTA ATCAGTTTGC AGCAGCAGAC GGTGCAAGAT |
| 751 | TTAAGGAGTC GGATCGATGA CGAGCAGAAG AGATGCTGGA CGGCTTTACA |
| 801 | ACGTATTAAC CAATCTCAGA AGGATATACA ACCGGCTCAT GATCGCGAGG |
| 851 | CTTCGCAGCG TGCCTGTGAG GGCACAGAGA TGGATTGTGC AGAACGCCAG |
| 901 | CAACTGGAGA AGGATTTAAG GAGACAGCTG AAATCTATGC AGGAGTGGAT |
| 951 | TGAGATGAGG GGCACAATCC ATCAACAAGA GAAGGCTTGG CGTAAGCAGA |
| 1001 | ATGCCAAATT AGAAAGATTA CAAGAGTATC TGAGACTTAC TGGGATTGCT |
| 1051 | TTTGACGAAC AATCTCTGTT CTATCGCGAA TATAAAGAGA AATATCTGAG |
| 1101 | TCAGAAACTA GATATGCAAA AGATTTTACA GGAAGTCAAC GCAGAGAAAA |
| 1151 | GTGAGAAGGC TTGCTTAGAG AGTCTGGTCC ATGACTATGA GAAGCAGCTC |
| 1201 | GAACAAAAAG ATGCTAATCT GAAGAAAGCA GCAGCTGTTT GGGAAGAAGA |
| 1251 | ATTAGGGAAG CAGCAACAGG AAGACTACGA ACAAACCCAA GAAATTAGAC |
| 1301 | GTCTGAGTAC ATTCATTCTT GAGTACCAGG ACAGTCTGCG TGAGGCAGAA |
| 1351 | AAAGTTGAGA AAGATTTCCA AGAGCTACAA CAAAGGTATA GCCGTCTTCA |
| 1401 | AGAGGAGAAA CAGGTAAAAG AAAAAATCTT AGAAGAAAGT ATGAATCATT |
| 1451 | TTGCCGATCT CTTTGAGAAG GCTCAAAAGG AAAACATGGC CTACAAGAAG |
| 1501 | AAGTTAGCGG ATTTAGAGGG TGCCGCTGCT CCTACTGAGA TCGGTGAGGA |
| 1551 | CGATGACTGG GTACTCACAG ATTCTGCTTC TCTCAGCCAG AAGAAGATCC |
| 1601 | GCGAACTCGT GGAAGAGAAT CAAGAACTCC TGAAAGCACT TGCATTTAAA |
| 1651 | TCTAACGAAT TGACTCAACT GGTTGCCGAT GCTGTAGAAG CTGAAAAAGA |
| 1701 | AATCAGCAAG CTTCGAGAAC ACATAGAAGA GCAGAAAGAA GGATTACGAG |
| 1751 | CTCTTGATAA GATGCATGCA CAAGCGATCA AAGATTGCGA AGCTGCTCAG |
| 1801 | AGAAAATGCT GTGACCTTGA GAGCCTTCTC TCTCCTGTTC GAGAAGATGC |
| 1851 | TGGAATGAGA TTTGAGCTAG AGGTCGAGCT TCAAAGATTG CAAGAAGAAA |
| 1901 | ATGCACAGCT TAGAGCGGAG GTTGAAAGAC TAGAGCAAGA GCAATTTCAA |
| 1951 | GGATAA |

[0538] The PSORT algorithm predicts an inner membrane location (0.646).

[0539] The protein was expressed in E. coli and purified as a his-tag product and as a GST-fusion product. The purified GST-fusion product is shown in FIG. 36A. The recombinant GST-fusion protein was used to immunise mice, whose sera were used in a Western blot (FIG. 36B) and for FACS analysis.

[0540] These experiments show that cp6879 is useful immunogen. These properties are not evident from the sequence alone.

### Example 37

[0541] The following C. pneumoniae protein (PID 4376767) was expressed <SEQ ID 73; cp6767>:

| | |
|---|---|
| 1 | MIKQIGRFFR AFIFIMPLSL TSCESKIDRN RIWIVGTNAT YPPFEYVDAQ |
| 51 | GEVVGFDIDL AKAISEKLGK QLEVREFAFD ALILNLKKHR IDAILAGMSI |
| 101 | TPSRQKEIAL LPYYGDBVQE LMVVSKRSLE TPVLPLTQYS SVAVQTGTFQ |
| 151 | EHYLLSQPGI CVRSFDSTLE VIMEVRYGKS PVAVLEPSVG RVVLKDFPNL |
| 201 | VATPLELPPE CWVLGCGLGV AKDRPEEIQT IQQAITDLKS EGVIQSLTKK |
| 251 | WQLSEVAYR* |

[0542] The cp6767 nucleotide sequence <SEQ ID 74> is:

| | |
|---|---|
| 1 | ATGATAAAAC AAATAGGCCG TTTTTTTAGA GCATTTATTT TTATAATGCC |
| 51 | TTTATCTTTA ACAAGTTGTG AGTCTAAAAT CGATCGAAAT CGCATCTGGA |
| 101 | TTGTAGGTAC GAATGCTACA TATCCTCCTT TTGAGTATGT GGATGCTCAG |
| 151 | GGGGAAGTTG TAGGTTTCGA TATAGATTTG GCAAAGGCAA TTAGTGAAAA |
| 201 | ACTTGGCAAG CAATTGGAAG TTAGAGAATT CGCTTTCGAT GCTTTAATTT |
| 251 | TAAATTTAAA AAAACATCGT ATCGATGCAA TTTTAGCAGG AATGTCCATT |
| 301 | ACTCCTTCGC GTCAGAAGGA AATCGCCCTG CTTCCCTATT ATGGCGATGA |
| 351 | GGTTCAAGAG CTGATGGTGG TTTCTAAGCG GTCTTTAGAG ACCCCTGTGC |
| 401 | TTCCCCTAAC ACAGTATTCT TCTGTTGCTG TTCAGACAGG AACGTTTCAG |
| 451 | GAGCATTATC TTTTATCTCA GCCCGGAATT TGTGTCCGTT CTTTTGATAG |
| 501 | CACCTTGGAG GTGATTATGG AAGTTCGTTA TGGGAAATCT CCGGTTGCCG |
| 551 | TTCTAGAACC CTCGGTAGGA CGTGTCGTTC TTAAAGACTT CCCTAATCTT |
| 601 | GTTGCAACAA GATTAGAGCT CCCTCCTGAA TGTTGGGTGT TGGGCTGTGG |
| 651 | TCTCGGCGTA GCTAAAGATC GTCCTGAAGA AATACAAACG ATTCAACAAG |
| 701 | CGATTACAGA TTTAAAGAGC GAAGGGGTGA TTCAATCTTT AACCAAGAAA |
| 751 | TGGCAACTTT CTGAAGTTGC TTACGAATAG |

[0543] The PSORT algorithm predicts an inner membrane location (0.083).

[0544] The protein was expressed in E. coli and purified as a his-tag product and as a GST-fusion product. The purified his-tag product is shown in FIG. 37A. The recombinant his-tag protein was used to immunise mice, whose sera were used in a Western blot (FIG. 37B) and for FACS analysis (FIG. 37C). The GST-fusion was also used in a Western blot (FIG. 37D).

[0545] The cp6767 protein was also identified in the 2D-PAGE experiment and showed good cross-reactivity with human sera, including sera from patients with pneumonitis.

[0546] These experiments show that cp6767 is a useful immunogen. These properties are not evident from the sequence alone.

### Example 38

[0547] The following C. pneumoniae protein (PID 4376717) was expressed <SEQ ID 75; cp6717>:

| | |
|---|---|
| 1 | MMSRLRFRLA ALGIFFILLV PNSVSAKTIV ASDKEKVGVL VYDNSVEAFQ |
| 51 | QILDCIDHAN FYVELCPCMT GGRTLKEMVD HLEARMDLVP ELCSYIIIQP |
| 101 | TFTDAEDQKL LKALKERHPN RFFYVFTGCP PSTSILAPNV IEMHIKLSII |
| 151 | DGKYCILGGT NFEEFMCTPG DEVPEKVDNP RLFVSGVRRP LAFRDQDIML |
| 201 | RSTAFGLQLR EEYHXQPAMW DYYAHHMWFI DNPEQFAGAC PPLTLEQAEE |
| 251 | TVFPGFDKHE DLVLVDSSKI RIVLGGPHDK QPNPVTQEYL KLIQGARSSV |
| 301 | KLAHMYFIPK DELLNALVDV SHNHGVHLSL ITNGCHELSP AITGPYAWGN |
| 351 | RINYFALLYG KRYPLWKKWF CEKLKPYERV SIYEFAIWET QLHKKCMIID |
| 401 | DEIFVIGSYN FGKKSDAFDY ESIVVIESPE VAAKANKVFN KDIGLSIPVS |
| 451 | HGDIPSWYPH SVHHTLGHLQ LTYMPA* |

[0548] A predicted signal peptide is highlighted.

[0549] The cp6717 nucleotide sequence <SEQ ID 76> is:

| | |
|---|---|
| 1 | ATGATGAGTC GGTTGCGTTT TCGCTTGGCA GCTCTTGGAA TATTTTTTAT |
| 51 | TTTGCTGGTT CCTAATTCTG TTTCAGCAAA GACAATCGTA GCTTCAGACA |
| 101 | AGGAGAAGGT TGGAGTTCTT GTTTATGACA ATAGTGTAGA GGCCTTTCAA |
| 151 | CAGATATTGG ATTGCATAGA TCATGCAAAT TTTTATGTAG AACTGTCTCC |
| 201 | CTGCATGACA GGAGGCCGAA CGCTTAAAGA GATGGTAGAT CACCTCGAGG |
| 251 | CTCGTATGGA TCTGGTTCCA GAGCTCTGTA GCTATATCAT TATCCAACCC |
| 301 | ACGTTTACCG ATGCTGAAGA CCAAAAATTA CTCAAAGCTC TCAAAGAACG |
| 351 | TCATCCCAAC CGGTTTTTCT ACGTTTTTAC AGGGTGCCCA CCCTCAACAA |
| 401 | GCATCCTCGC TCCTAATGTC ATTGAAATGC ATATCAAACT TTCTATCATC |
| 451 | GATGGGAAAT ATTGTATTTT AGGTGGTACC AATTTTGAAG AGTTTATGTG |
| 501 | CACTCCAGGG GATGAGGTTC CTGAGAAAGT GGATAACCCA CGTTTATTTG |
| 551 | TCAGTGGAGT GCGTCGGCCC CTAGCATTTC GTGATCAGGA TATCATGTTG |
| 601 | CGTTCTACAG CATTCGGTTT GCAGCTCAGA GAAGAATATC ATAAGCAATT |
| 651 | TGCTATGTGG GACTACTATG CACATCATAT GTGGTTCATT GATAATCCTG |
| 701 | AACAGTTTGC AGGCGCCTGT CCTCCACTGA CTTTAGAACA AGCCGAGGAG |
| 751 | ACAGTATTTC CTGGATTTGA CAAACATGAA GATCTTGTTC TTGTCGACTC |
| 801 | TTCCAAGATC AGGATAGTTT TAGGTGGTCC CCACGATAAG CAACCCAATC |
| 851 | CTGTGACTCA AGAATATTTG AAACTTATCC AGGGAGCTAG ATCTTCTGTG |
| 901 | AAGCTTGCTC ACATGTATTT CATCCCTAAG GACGAGCTTT TAAATGCTCT |
| 951 | TGTCGACGTT TCTCATAATC ACGGTGTTCA TCTGAGTTTA ATTACGAACG |
| 1001 | GCTGTCATGA ATTAAGTCCT GCAATTACAG GACCCTATGC TTGGGGAAAC |
| 1051 | CGTATTAACT ATTTCGCCTT GCTCTATGGG AAACGGTATC CTCTTTGGAA |
| 1101 | AAAATGGTTT TGCGAAAAGC TAAAACCTTA TGAGCGGGTT TCTATTTATG |
| 1151 | AGTTTGCTAT TTGGGAAACG CAGTTGCACA AGAAGTGTAT GATTATCGAT |
| 1201 | GATGAAATTT TTGTGATCGG AAGTTATAAT TTTGGAAAGA AAAGTGATGC |
| 1251 | CTTTGATTAC GAAAGTATTG TAGTTATCGA ATCTCCAGAA GTCGCTGCAA |
| 1301 | AAGCTAACAA AGTCTTCAAT AAAGATATCG GATTGTCGAT TCCTGTAAGT |
| 1351 | CATGGCGACA TTTTCTCTTG GTATTTCCAT TCCGTACACC ACACTTTGGG |
| 1401 | ACATTTGCAG CTGACCTATA TGCCAGCCTA G |

[0550] The PSORT algorithm predicts a periplasmic location (0.939).

[0551] The protein was expressed in E. coli and purified as a GST-fusion (FIG. 38A), as a his-tagged protein, and as a GST/his fusion product. The proteins were used to immunise mice, whose sera were used in a Western blot (FIG. 38B) and for FACS analysis.

[0552] These experiments show that cp6717 is a useful immunogen. These properties are not evident from the sequence alone.

### Example 39

[0553] The following C. pneumoniae protein (PID 4376577) was expressed <SEQ ID 77; cp6577>:

| | |
|---|---|
| 1 | MKKLLFSTFL LVIGSTSAAH ANLGYVNLKR CLEESDLGKK ETEELEAMKQ |
| 51 | QFVKNAEKIE EELTSIYNKL QDEDYMHSLS DSASEELPKK FEDLSGEYNA |
| 101 | YQSQYYQSIN QSNVKRIQKL IQEVKIAAES VRSKEKLEAI LNEEAVLAIA |
| 151 | PGTDKTTEII AILNESFKKQ N* |

[0554] A predicted signal peptide is highlighted.

[0555] The cp6577 nucleotide sequence <SEQ ID 78> is:

| | |
|---|---|
| 1 | ATGAAAAAAT TATTATTTTC TACATTTCTT CTTGTTTTAG GATCAACAAG |
| 51 | CGCAGCTCAT GCAAATTTAG GCTATGTTAA TTTAAAGCGA TGTCTTGAAG |
| 101 | AATCCGATCT AGGTAAAAAG GAAACTGAAG AATTGGAAGC TATGAAACAG |
| 151 | CAGTTTGTAA AAAATGCTGA GAAAATAGAA GAAGAACTCA CTTCTATTTA |
| 201 | TAATAAGTTG CAAGATGAAG ATTACATCGA AAGCCTATCG GATTCTGCCT |
| 251 | CTGAAGAGTT GCGAAAGAAA TTCGAAGATC TTTCAGGAGA GTACAAPGCG |
| 301 | TACCAGTCTC AGTACTATCA ATCTATCAAT CAAAGTAATG TAAAACGCAT |
| 351 | TCAAAAACTC ATTCAAGAAG TAAAAATAGC TGCAGAATCA GTGCGGTCCA |
| 401 | AAGAAAAACT AGAAGCTATC CTTAATGAAG AAGCTGTCTT AGCAATAGCA |
| 451 | CCTCGGACTG ATAAAACAAC CGAAATTATT GCTATTCTTA ACGAATCTTT |
| 501 | CAAAAAACAA AACTAG |

[0556] The PSORT algorithm predicts a periplasmic space location (0.932).

[0557] The protein was expressed in E. coli and purified as a his-tag product (FIG. 39A) and as a GST-fusion product (FIG. 39B). The recombinant GST-fusion protein was used to immunise mice, whose sera were used in a Western blot (FIG. 39C) and for FACS analysis.

[0558] The cp6577 protein was also identified in the 2D-PAGE experiment.

[0559] These experiments show that cp6577 is a useful immunogen. These properties are not evident from the sequence alone.

### Example 40

[0560] The following C. pneumoniae protein (PID 4376446) was expressed <SEQ ID 79; cp6446>:

| | |
|---|---|
| 1 | MKQPMSLIFS SVCLGLGLGS LSSCNQKPSW NYHNTSTSEE |
| | FFVHGNKSVS |
| 51 | QLPHYPSAFR TTQIFSEEHN DPYVVAKTDE ESRKIWREIH |
| | KNLKIKGSYI |
| 101 | PISTYGSIMH PKSAALTLKT YRPHPIWING YERSFNIDTG |
| | KYLKNGSRRR |
| 151 | TSHDGPKNRA VLNLIKSSGR RCNAIGLEMT EEDFVIARRR |
| | EGVYSLYPVE |
| 201 | VCSYPQGNPF VIAYAWIADE SACSKEVLPV KGYYSLVWES |
| | VSSSDSLNAF |
| 251 | GDSFAEDYLR STFLANGTSI LCVHESYKKV PPQP* |

[0561] A predicted signal peptide is highlighted.

[0562] The cp6446 nucleotide sequence <SEQ ID 80> is:

| | |
|---|---|
| 1 | ATGAAACAGC CCATGTCTCT TATCTTTTCA AGTGTATGTT |
| | TAGGATTAAG |
| 51 | TCTTGGATCT CTTTCCTCCT GTAATCAAAA GCCCTCTTGG |
| | AATTATCACA |
| 101 | ACACTTCAAC GAGCGAAGAA TTCTTTGTTC ATGGAAATAA |
| | GAGTGTTTCG |
| 151 | CAACTGCCTC ATTATCCTTC TGCATTTCGT ACGACTCAAA |
| | TCTTTTCTGA |
| 201 | AGAGCACAAT GATCCTTATG TCGTAGCTAA GACTGATGAA |
| | GAGTCTCGTA |
| 251 | AAATTTGGAG AGAAATCCAT AAAAATCTCA AAATCAAAGG |
| | TTCTTACATT |
| 301 | CCCATATCGA CTTATGGAAG TCTGATGCAC CCAAAATCAG |
| | CAGCTCTTAC |
| 351 | ATTAAAAACG TATCGTCCAC ATCCTATTTG GATAAATGGA |
| | TACGAGCGTT |
| 401 | CTTTTAATAT AGACACAGGA AAGTACTTAA AAAACGGAAG |
| | TCGCCGTAGA |
| 451 | ACTTCTCACG ATGGTCCGAA AAATCGAGCT GTACTGAAPC |
| | TCATTAAATC |
| 501 | TTCGGGACGA CGCTGTAATG CTATAGGCCT TGAGATGACA |
| | GAAGAAGACT |
| 551 | TTGTAATAGC TAGAAGGCGA GAAGGTGTTT ATAGCCTGTA |
| | TCCCGTTGAA |
| 601 | GTGTGCTCGT ATCCTCAGGG GAATCCTTTT GTCATTGCTT |
| | ATGCCTGGAT |
| 651 | TGCAGATGAG AGTGCTTGCT CAAAAGAGGT CCTACCTGTA |
| | AAAGGGTACT |
| 701 | ATTCTTTAGT CTGCGAAAGC GTTTCTTCCT CTGATTCTCT |
| | GAATGCTTTT |
| 751 | GGAGATTCCT TTGCAGAGGA CTACCTCAGA AGCACGTTTT |
| | TAGCAAACGG |
| 801 | AACTTCTATA CTCTGTGTTC ATGAAAGCTA TAAGAAAGTT |
| | CCTCCTCAGC |
| 851 | CCTAA |

[0563] The PSORT algorithm predicts an inner membrane location (0.177).

[0564] The protein was expressed in E. coli and purified as a his-tag product and a GST-fusion product. The GST-fusion product is shown in FIG. 40A. The recombinant his-tag protein was used to immunise mice, whose sera were used in a Western blot (FIG. 40B) and for FACS analysis.

[0565] These experiments show that cp6446 is a useful immunogen. These properties are not evident from the sequence alone.

### Example 41

[0566] The following C. pneumoniae protein (PID 4377108) was expressed <SEQ ID 81; cp7108>:

| | |
|---|---|
| 1 | MKQPMSLIFS SVCLGLGLGS LSSCNQKPSW NYHNTSTSEE |
| | FFVHGNKSVS |
| 51 | TFTDLELLSK EGWSEAHAVS GNGSRIVGAS GAGQGSVTAV |
| | IWESHLIKHL |
| 101 | GTLGGEASSA EGISKDGEVV VGWSDTREGY THAFVFDGRD |
| | MKDLGTLGAT |
| 151 | YSVARGVSGD GSIIVGVSAT ARGEDYGWQV GVKWEKGKIK |
| | QLKLLPQGLW |
| 201 | SEANAISEDG TVIVGRGEIS RNHIVAVKWN KNAVYSLGTL |
| | GGSVASAEAI |
| 251 | SANGKVIVGW STTNNGETHA FMHKDETMHD LGTLGGGFSV |
| | ATGVSADGRA |
| 301 | IVGFSAVKTG EIHAFYYAEG EMEDLTTLGG EEARVPDISS |
| | EGNDIIGSIK |
| 351 | TDAGAERAYL FHIHK* |

[0567] A predicted signal peptide is highlighted.

[0568] The cp7108 nucleotide sequence <SEQ ID 82> is:

| | |
|---|---|
| 1 | ATGAGTAAGA AGATAAAGGT TCTAGGTCAT TTGACGCTCT |
| | GCACTCTGTT |
| 51 | TAGAGGAGTG CTGTGTGCAG CGGCCCTTTC CAACATAGGA |
| | TATGCGAGTA |
| 101 | CTTCTCAGGA ATCACCATAT CAGAAGTCTA TAGAAGACTG |
| | GAAAGGGTAT |
| 151 | ACCTTTACAG ATCTTGAGTT ACTGAGTAAG GAAGGGTGGT |
| | CTGAAGCTCA |
| 201 | TGCAGTTTCT GGAAATGGCA GTAGAATTGT AGGAGCTTCG |
| | GGAGCTGGCC |
| 251 | AAGGTAGTGT GACTGCTGTC ATATGGGAAA GTCACCTGAT |
| | AAAACATCTC |
| 301 | GGCACTTTAG GTGGCGAGGC TTCATCTGCA GAGGGAATTT |
| | CAAAGGATGC |
| 351 | AGAGGTGGTC GTTGGGTGGT CAGATACTAG AGAGGGATAT |
| | ACTCATGCCT |
| 401 | TTGTCTTCGA CGGTAGAGAT ATGAAAGATC TCGGTACTCT |
| | AGGAGCTACC |
| 451 | TATTCTGTAG CAAGGGGTGT TTCTGGAGAT GGTAGTATCA |
| | TCGTAGGAGT |
| 501 | CTCTGCAACT GCTCGTGGAG AGGATTACGG ATGGCAAGTT |
| | GGTGTCAAGT |
| 551 | GGGAAAAAGG GAAAATCAAA CAATTGAAGT TGTTGCCTCA |
| | AGGTCTCTGG |
| 601 | TCTGAGGCGA ATGCAATCTC TGAGGATGGT ACGGTGATTG |
| | TCGGGAGAGG |
| 651 | GGAAATCTCT CGCAATCACA TCGTTGCTGT AAAATGGAAT |
| | AAAAATGCTG |
| 701 | TGTATAGTTT GGGGACTCTC GGAGGTAGTG TCGCTTCAGC |
| | AGAGGCTATA |
| 751 | TCGGCAAATG GGAAAGTAAT TGTAGGATGG TCCACGACTA |
| | ATAATGGTGA |
| 801 | GACTCATGCC TTTATGCTCA AAGATGAGAC AATGCACGAT |
| | CTCGGCACTC |
| 851 | TAGGAGGAGG TTTTTCTGTC GCAACTGGAG TTTCTGCTGA |
| | TGGGAGAGCC |
| 901 | ATCGTAGGAT TTTCAGCAGT GAAGACCGGA GAAATTCATG |
| | CTTTTTACTA |
| 951 | TGCAGAAGGA GAAATGGAGG ATTTAACAAC TTTGGGAGGG |
| | GAAGAAGCTC |
| 1001 | GAGTGTTCGA CATATCTAGC GAAGGAAACG ATATCATTGG |
| | CTCTATAAAA |
| 1051 | ACTGACGCTG GAGCTGAACG CGCCTATCTG TTCCATATAC |
| | ATAAATAA |

[0569] The PSORT algorithm predicts an outer membrane location (0.921).

[0570] The protein was expressed in E. coli and purified as a GST-fusion product, as shown in FIG. 41A. The recombinant protein was used to immunise mice, whose sera were used in a Western blot (FIG. 41B) and for FACS analysis FIG. 41C). A his-tagged protein was also expressed.

[0571] The cp7108 protein was also identified in the 2D-PAGE experiment.

[0572] These experiments show that cp7108 is a surface-exposed and immunoaccessible protein, and that it is a useful immunogen. These properties are not evident from the sequence alone.

### Example 42

[0573] The following C. pneumoniae protein (PID 4377287) was expressed <SEQ ID 83; cp7287>:

| | |
|---|---|
| 1 | MVAKKTVRSY RSSFSHSVIV AILSAGIAFE ASHSLHSSELD |
| | LGVFNKQFEE |
| 51 | HSAHVBEAQT SVLKGSDPVN PSQKESEKVL YTQVPLTQGS |
| | SGESLDLADA |
| 101 | NFLEHFQHLF EETTVFGIDQ KLVWSDLDTR NFSQPTQBPD |
| | TSNAVSEKIS |
| 151 | SDTKENRXDL ETEDPSRKSG LKEVSSDLPK SPETAVAAIS |
| | EDLEISENIS |
| 201 | ARDPLQGLAF FYKNTSSQSI SEKDSSFQGI IFSGSFANSG |
| | LGFENLKAPK |
| 251 | SGAAVYSDRD IVFENLVKGL SFISCESLED GSAAGVNIVV |
| | THCGDVTLTD |
| 301 | CATGLDLEAL IWVKDFSRGG AVFTAENHEV QNNLAGGILS |
| | VVGNXGAIVV |
| 351 | EKNSABKSNG GAFACGSFVY SNNENTALWK ENQALSGGAI |
| | SSASDIDIQG |
| 401 | NCSAIEFSGN QSLIALGEHI GLTDFVGGGA LAAQGTLTLR |
| | NNAVVQCVKN |
| 451 | TSKTHGGAIL AGTVDLNETI SEVAFKQNTA ALTGGALSAN |
| | DKVIIANNFG |
| 501 | EILFEQNEVR NHGGAIYCGC RSNPKLEQKD SGENINIIGN |
| | SGAITFLKNK |
| 551 | ASVLEVMTQA EDYAGGGALW GHNVLLDSNS GNIQFIGNIG |
| | GSTFWIGEYV |
| 601 | GGGAILSTDR VTISNNSGDV VFKGNRGQCL AQKYVAPQET |
| | APVESDASST |
| 651 | NKDEKSLNAC SHGDHYPPKT VEEEVPPSLL EEHPVVSSTD |
| | IRGGGAILAQ |
| 701 | HIFITDNTGN LRFSGNLGGG EESSTVGDLA IVGGGALLST |
| | NEVNVCSNQN |
| 751 | VVPSDNVTSN GCDSGGAILA KKVDISANHS VEFVSNGSGK |
| | FGGAVCALNE |
| 801 | SVNITDNGSA VSFSKNRTRL GGAGVAAPQG SVTICGNQGN |
| | IAFKENFVFG |
| 851 | SENQRSGGGA IIANSSVNIQ DNAGDILFVS NSTGSYGGAI |
| | FVGSLVASEG |
| 901 | SNPRTLTITG NSGDILFAKN STQTAASLSE KDSFGGGAIY |
| | TQNLKIVKNA |
| 951 | GNVSFYGNRA PSGAGVQIAD GGTVCLEAFG GDILFEGNIN |
| | FDGSFNAIHL |
| 1001 | CGNDSKIVEL SAVQDKNIIF QDAITYEENT IRGLPKDKVS |
| | PLSAPLSIFN |
| 1051 | SKPQDDSAQH HEGTIRFSRG VSKIPQIAAI QEGPLALSQN |
| | AELWLAGLKQ |
| 1101 | ETGSSIVLSA GSILRIFDSQ VDSSAPLPTE NKEETLVSAG |
| | VQINMSSPTP |
| 1151 | NKDKAVDTPV LADIISITVD LSSFVPEQDG TLPLPPEIII |
| | PKGTKLHSNA |
| 1201 | IDLKIIPPTN VGYENHALLS SHKDIPLISL KTAEGMTGTP |
| | TADASLSNIK |
| 1251 | IDVSLPSITP ATYGHTGVWS ESKMEDGRLV VGWQPTGYKL |
| | NPEKQGALVL |
| 1301 | NNLWSHYTDL RALKQEIFAH HTIAQRMELD FSTNVWGSGL |
| | GVVEDCQNIG |
| 1351 | EFDGFKHHLT GYALGLDTQL VEDFLIGGCF SQFFGKTESQ |
| | SYKAKNDVKS |
| 1401 | YMGAAYAGIL AGPWLIKGAF VYGNINNDLT TDYGTLGIST |
| | GSWIGKGFIA |
| 1451 | GTSIDYRYIV NPRRFISAIV STVVPFVBAE YVRIDLPEIS |
| | EQGKEVRTFQ |
| 1501 | KTRFENVAIP FGFALEHAYS RGSRABVNSV QLAYVFDVYR |
| | KGPVSLITLK |
| 1551 | DAAYSWKSYG VDIPCKAWKA RLSNNTEWNS YLSTYLAFNY |
| | EWREDLIAYD |
| 1601 | FNGGIRIIF* |

[0574] A predicted signal peptide is highlighted.

[0575] The cp7287 nucleotide sequence <SEQ ID 84> is:

| | |
|---|---|
| 1 | ATGGTAGCGA AAAAAACAGT ACGATCTTAT AGGTCTTCAT |
| | TTTCTCATTC |
| 51 | CGTAATAGTA GCAATATTGT CAGCAGGCAT TGCTTTTGAA |
| | GCACATTCCT |
| 101 | TACACAGCTC AGAACTAGAT TTAGGTGTAT TCAATAAACA |
| | GTTTGAGGAA |
| 151 | CATTCTGCTC ATGTTGAAGA GGCTCAAACA TCTGTTTTAA |
| | AGGGATCAGA |
| 201 | TCCTGTAAAT CCCTCTCAGA AAGAATCCGA GAAGGTTTTG |
| | TACACTCAAG |
| 251 | TGCCTCTTAC CCAAGGAAGC TCTGGAGAGA GTTTGGATCT |
| | CGCCGATGCT |
| 301 | AATTTCTTAG AGCATTTTCA GCATCTTTTT GAAGAGACTA |
| | CAGTATTTGG |
| 351 | TATCGATCAA AAGCTGGTTT GGTCAGATTT AGATACTAGG |
| | AATTTTTCCC |
| 401 | AACCCACTCA AGAACCTGAT ACAAGTAATG CTGTAAGTGA |
| | GAAAATCTCC |
| 451 | TCAGATACCA AAGAGAATAG AAAAGACCTA GAGACTGAAG |
| | ATCCTTCAAA |
| 501 | AAAAAGTGGC CTTAAAGAAG TTTCATCAGA TCTCCCTAAA |
| | AGTCCTGAAA |
| 551 | CTGCAGTAGC AGCTATTTCT GAAGATCTTG AAATCTCAGA |
| | AAACATTTCA |
| 601 | GCAAGAGATC CTCTTCAGGG TTTAGCATTT TTTTATAAAA |
| | ATACATCTTC |
| 651 | TCAGTCTATC TCTGAAAAGG ATTCTTCATT TCAAGGAATT |
| | ATCTTTTCTG |
| 701 | GTTCAGOAGC TAATTCAGGG CTAGGTTTTG AAAATCTTAA |
| | GGCGCCGAAA |
| 751 | TCTGGGGCTG CAGTTTATTC TGATCGAGAT ATTGTTTTTG |
| | AAAATCTTGT |
| 801 | TAAAGGATTG AGTTTTATAT CTTGTGAATC TTTAGAAGAT |
| | GGCTCTGCCG |
| 851 | CAGGTGTAAA CATTGTTGTG ACCCATTGTG GTGATGTAAC |
| | TCTCACTGAT |
| 901 | TGTGCCACTG GTTTAGACCT TGAAGCTTTA CGTCTGGTTA |
| | AAGATTTTTC |
| 951 | TCGTGGAGGA GCTGTTTTCA CTGCTCGCAA CCATGAAGTG |
| | CAAAATAACC |
| 1001 | TTGCAGGTGG AATTCTATCC GTTGTAGGCA ATAAAGGAGC |
| | TATTGTTGTA |
| 1051 | GAGAAAAATA GTGCTGAGAA GTCCAATGGA GGAGCTTTTG |
| | CTTGCGGAAG |
| 1101 | TTTTGTTTAC AGTAACAACG AAAACACCGC CTTGTGGAAA |
| | GAAAATCAAG |
| 1151 | CATTATCAGG AGGAGCCATA TCCTCAGCAA GTGATATTGA |
| | TATTCAAGGG |
| 1201 | AACTGTAGCG CTATTGAATT TTCAGGAAAC CAGTCTCTAA |
| | TTGCTCTTGG |
| 1251 | AGAGCATATA GGGCTTACAG ATTTTGTAGG TGGAGGAGCT |
| | TTAGCTGCTC |
| 1301 | AAGGGACGCT TACCTTAAGA AATAATGCAG TAGTGCAATG |
| | TGTTAAAAAC |
| 1351 | ACTTCTAAAA CACATGGTGG AGCTATTTTA GCAGGTACTG |
| | TTGATCTCAA |
| 1401 | CGAAACAATT AGCGAAGTTG CCTTTAAGCA GAATACAGCA |
| | GCTCTAACTG |
| 1451 | GAGGTGCTTT AAGTGCAAAT GATAAGGTTA TAATTGCAAA |
| | TAACTTTGGA |
| 1501 | GAAATTCTTT TTGAGCAAAA CGAAGTGAGG AATCACGGAG |
| | GAGCCATTTA |
| 1551 | TTGTGGATGT CGATCTAATC CTAAGTTAGA ACAAAAGGAT |
| | TCTGGAGAGA |
| 1601 | ACATCAATAT TATTGGAAAC TCCGGAGCTA TCACTTTTTT |
| | AAAAAATAAG |
| 1651 | GCTTCTGTTT TAGAAGTGAT GACACAAGCT GAAGATTATG |
| | CTGGTGGAGG |
| 1701 | CGCTTTATGG GGGCATAATG TTCTTCTAGA TTCCAATAGT |
| | GGGAATATTC |
| 1751 | AATTTATAGG AAATATAGGT GGAAGTACCT TCTGGATAGG |
| | AGAATATGTC |
| 1801 | GGTGGTGGTG CGATTCTCTC TACTGATAGA GTGACAATTT |
| | CTAATAACTC |
| 1851 | TGGAGATGTT GTTTTTAAAG GAAACAAAGG CCAATGTCTT |
| | GCTCAAAAAT |
| 1901 | ATGTAGCTCC TCAAGAAACA GCTCCCGTGG AATCAGATGC |
| | TTCATCTACA |
| 1951 | AATAAAGACG AGAAGAGCCT TAATGCTTGT AGTCATGGAG |
| | ATCATTATCC |
| 2001 | TCCTAAAACT GTAGAAGAGG AAGTGCCACC TTCATTGTTA |
| | GAAGAACATC |
| 2051 | CTGTTGTTTC TTCGACAGAT ATTCGTGGTG GTGGGGCCAT |
| | TCTAGCTCAA |
| 2101 | CATATCTTTA TTACAGATAA TACAGGAAAT CTGAGATTCT |
| | CTGGGAACCT |
| 2151 | TGGTGGTGGT GAAGAGTCTT CTACTGTCGG TGATTTAGCT |
| | ATCGTAGGAG |
| 2201 | GAGGTGCTTT GCTTTCTACT AATGAAGTTA ATGTTTGCAG |
| | TAACCAAAAT |
| 2251 | GTTGTTTTTT CTGATAACGT GACTTCAAAT GGTTGTGATT |
| | CAGGGGGAGC |
| 2301 | TATTTTAGCT AAAAAAGTAG ATATCTCCGC GAACCACTCG |
| | GTTGAATTTG |
| 2351 | TCTCTAATGG TTCAGGGAAA TTCGGTGGTG CCGTTTGCGC |
| | TTTAAACGAA |
| 2401 | TCAGTAAAAA TTACGGACAA TGGCTCGGCA GTATCATTCT |
| | CTAAAAATAG |
| 2451 | AACACGTCTT GGCGGTGCTG GAGTTGCAGC TCCTCAAGGC |
| | TCTGTAACGA |
| 2501 | TTTGTGGAAA TCAGGGAAAC ATAGCATTTA AAGAGAACTT |
| | TGTTTTTGCC |
| 2551 | TCTGAAAATC AAAGATCAGG TGGAGGAGCT ATCATTGCTA |
| | ACTCTTCTGT |
| 2601 | AAATATTCAG GATTACGCAG GAGATATOCT ATTTGPAAGT |
| | AACTCTACGG |
| 2651 | GATCTTATGG AGGTGCTATT TTTGTAGGAT CTTTGGTTGC |
| | TTCTGAAGGC |
| 2701 | AGCAACCCAC GAACGCTTAC AATTACAGGC AACAGTGGGG |
| | ATATCCTATT |
| 2751 | TGCTAAAAAT AGCACGCAAA CAGCCGCTTC TTTATCAGAA |
| | AAAGATTCCT |
| 2801 | TTGGTGGAGG GGCCATCTAT ACACAAAACC TCAAAATTGT |
| | AAAGAATGCA |
| 2851 | GGGAACGTTT CTTTCTATGG CAACAGAGCT CCTAGTGGTG |
| | CTGGTGTCCA |
| 2901 | AATTGCAGAC GGAGGAACTG TTTGTTTAGA GGCTTTTGGA |
| | GGAGATATCT |
| 2951 | TATTTGAAGG GAATATCAAT TTTGATGGGA GTTTCAATGC |
| | GATTCACTTA |
| 3001 | TGCGGGAATG ACTCAAAAAT CGTAGAGCTT TCTGCTGTTC |
| | AAGATAAAAA |
| 3051 | TATTATTTTC CAAGATGCAA TTACTTATGA AGAGAACACA |
| | ATTCGTGCCT |
| 3101 | TGCCAGATAA AGATGTCAGT CCTTTAAGTG CCCCTTCATT |
| | AATTTTTAAC |
| 3151 | TCCAAGCCAC AAGATGACAG CGCTCAACAT CATGAAGGGA |
| | CGATACGGTT |
| 3201 | TTCTCGAGGG GTATCTAAAA TTCCTCAGAT TGCTGCTATA |
| | CAAGAGGGAA |
| 3251 | CCTTAGCTTT ATCACAAAAC GCAGAGCTTT GGTTGGCAGG |
| | ACTTAAACAG |
| 3301 | GAAACAGGAA GTTCTATCGT ATTGTCTGCG GGATCTATTC |
| | TCCGTATTTT |
| 3351 | TGATTCCCAG GTTGATAGCA GTGCGCCTCT TCCTACAGAA |
| | AATAAAGAGG |
| 3401 | AGACTCTTGT TTCTGCCGGA GTTCAAATTA ACATGAGCTC |
| | TCCTACACCC |
| 3451 | AATAAAGATA AAGCTGTAGA TACTCCAGTA CTTGCAGATA |
| | TCATAAGTAT |
| 3501 | TACTGTAGAT TTGTCTTCAT TTGTTCCTGA GCAAGACGGA |
| | ACTCTTCCTC |
| 3551 | TTCCTCCTGA AATTATCATT CCTAAGGGAA CAAAATTACA |
| | TTCTAATGCC |
| 3601 | ATAGATCTTA AGATTATAGA TCCTACCAAT GTGGGATATG |
| | AAAATCATGC |
| 3651 | TCTTCTAAGT TCTCATAAAG ATATTCCATT AATTTCTCTT |
| | AAGACAGCGG |
| 3701 | AAGGAATGAC AGGGACGCCT ACAGCAGATG CTTCTCTATC |
| | TAATATAAAA |
| 3751 | ATAGATGTAT CTTTACCTTC GATCACACCA GCAACGTATG |
| | GTCACACAGG |
| 3801 | AGTTTGGTCT GAAAGTAAAA TGGAAGATGG AAGACTTGTA |
| | GTCGGTTGGC |
| 3851 | AACCTACGGG ATATAAGTTA AATCCTGAGA AGCAAGGGGC |
| | TCTAGTTTTG |
| 3901 | AATAATCTCT GGAGTCATTA TACAGATCTT AGAGCTCTTA |
| | AGCAGGAGAT |
| 3951 | CTTTGCTCAT CATACGATAG CTCAAAGAAT GGAGTTAGAT |
| | TTCTCGACAA |
| 4001 | ATGTCTGGGG ATCAGGATTA GGTGTTGTTG AAGATTGTCA |
| | GAACATCGGA |
| 4051 | GAGTTTGATG GGTTCAAACA TCATCTCACA GGGTATGCCC |
| | TAGGCTTGGA |
| 4101 | TACACAACTA GTTGAAGACT TCTTAATTGG AGGATGTTTC |
| | TCACAGTTCT |
| 4151 | TTGGTAAAAC TGAAAGCCAA TCCTACAAAG CTAAGAACGA |
| | TGTGAAGAGT |
| 4201 | TATATGGGAG CTGCTTATGC GGGGATTTTA GCAGGTCCTT |
| | GGTTAATAAA |
| 4251 | AGGAGCTTTT GTTTACGGTA ATATAAACAA CGATTTGACT |
| | ACAGATTACG |
| 4301 | GTACTTTAGG TATTTCAACA GGTTCATGGA TAGGAAAAGG |
| | GTTTATCGCA |
| 4351 | GGCACAAGCA TTGATTACCG CTATATTGTA AATCCTCGAC |
| | GGTTTATATC |
| 4401 | GGCAATCGTA TCCACAGTGG TTCCTTTTGT AGAAGCCGAG |
| | TATGTCCGTA |
| 4451 | TAGATCTTCC AGAAATTAGC GAACAGGGTA AAGAGGTTAG |
| | AACGTTCCAA |
| 4501 | AAAACTCGTT TTGAGAATGT CGCCATTCCT TTTGGATTTG |
| | CTTTAGAACA |
| 4551 | TGCTTATTCG CGTGGCTCAC GTGCTGAAGT GAACAGTGTA |
| | CAGCTTGCTT |
| 4601 | ACGTCTTTGA TGTATATCGT AAGGGACCTG TCTCTTTGAT |
| | TACACTCAAG |
| 4651 | GATGCTGCTT ATTCTTGGAA GAGTTATGGG GTAGATATTC |
| | CTTGTAAAGC |
| 4701 | TTGGAAGGCT CGCTTGAGCA ATAATACGGA ATGGAATTCA |
| | TATTTAAGTA |
| 4751 | CGTATTTAGC GTTTAATTAT GAATGGAGAG AAGATCTGAT |
| | AGCTTATGAC |
| 4801 | TTCAATGGTG GTATCCGTAT TATTTTCTAG |

[0576] The PSORT algorithm predicts an inner membrane location (0.106).

[0577] The protein was expressed in E. coli and purified as a GST-fusion product, as shown in FIG. 42A. The recombinant protein was used to immunise mice, whose sera were used in a Western blot (FIG. 42B) and for FACS analysis (FIG. 42C). A his-tagged protein was also expressed.

[0578] The cp7287 protein was also identified in the 2D-PAGE experiment and showed good cross-reactivity with human sera, including sera from patients with pneumonitis.

[0579] These experiments show that cp7287 is a surface-exposed and immunoaccessible protein, and that it is a useful immunogen. These properties are not evident from the sequence alone.

### Example 43

[0580] The following C. pneumoniae protein (PID 4377105) was expressed <SEQ ID 85; cp7105>:

| | |
|---|---|
| 1 | MSLYQKWWNS QLKKSLCYST VAALIFMIPS QESFADSLID |
| | LNLGLDPSVE |
| 51 | CLSGDGAFSV GYFTKAGSTP VEYQPFKYDV SKKTFTILSV |
| | ETANQSGYAY |
| 101 | GISYDGTITV GTCLSGAGKY NGAKWSADGT LTPLTGITGG |
| | TSHTEARAIS |
| 151 | KDTQVIEGFS YDASGQPKAV QWASGATTVT QLADISGGSR |
| | SSYAYAISDD |
| 201 | GTIIVGSMES TITRKTTAVK WVNNVPTYLG TLGGDASTGL |
| | YISGDGTVIV |
| 251 | GAANTATVTN GNQESHAYMY KDNQMKD* |

[0581] The cp7105 nucleotide sequence <SEQ ID 86> is:

| | |
|---|---|
| 1 | GTGAGTCTAT ATCAAAAATG GTGGAACAGT CAGTTAAAGA |
| | AGAGCCTCTG |
| 51 | CTATTCGACT GTTGCTGCTC TAATATTTAT GATTCCTTCT |
| | CAAGAATCCT |
| 101 | TTGCAGATAG TCTTATAGAT TTAAATTTAG GTTTAGATCC |
| | TTCGGTCGAA |
| 151 | TGTCTGTCAG GAGATGGTGC ATTTTCTGTT GGGTATTTTA |
| | CTAAGGCGGG |
| 201 | ATCGACTCCC GTAGAATATC AGCCGTTTAA ATACGACGTA |
| | TCTAAGAAGA |
| 251 | CATTCACAAT CCTTTCCGTA GAAACGGCAA ATCAGAGCGG |
| | CTATGCTTAC |
| 301 | GGAATCTCCT ACGATGGCAC GATCACTGTA GGAACGTGTA |
| | GCCTAGGTGC |
| 351 | AGGAAAATAT AACGGCGCAA AATGGAGTGC GGATGGCACT |
| | TTAACACCCT |
| 401 | TAACTGGAAT CACGGGGGGG ACGTCACATA CGGAAGCGCG |
| | TGCGATTTCT |
| 451 | AAGGATATTC AGGTGATCGA GGGTTTCTCA TATGATGCTT |
| | CAGGGCAACC |
| 501 | CAAGGCTGTG CAGTAGCGAC GCGGAGCGAC TACAGTAACA |
| | CAATTAGCAG |
| 551 | ATATTTCAGG AGGCTCTAGA AGCTCTTATG CGTTTGCTAT |
| | ATCTGATGAT |
| 601 | GGCACGATTA TTGTTGGGTC TATGGAGAGC ACGATAACAA |
| | GGAAAACTAC |
| 651 | AGCTGTAAAA TGGGTAAATA ATGTTCCTAC GTATCTGGGA |
| | ACCTTAGGAG |
| 701 | GAGATGCTTC TACAGGTCTT TATATTTCTG GAGACGGCAC |
| | CGTGATTGTA |
| 751 | GGTGCGGCAA ATACAGCAAC TGTAACCAAT GGGAATCAGG |
| | AATCCCACGC |
| 801 | CTATATGTAT AAAGATAACC AAATGAAAGA TTGA |

[0582] The PSORT algorithm predicts an inner membrane location (0.100).

[0583] The protein was expressed in E. coli and purified as a GST-fusion product, as shown in FIG. 43A. The recombinant protein was used to immunise mice, whose sera were used in a Western blot (FIG. 43B) and for FACS analysis (FIG. 43C). A his-tagged protein was also expressed.

[0584] This protein also showed good cross-reactivity with human sera, including sera from patients with pneumonitis.

[0585] These experiments show that cp7105 is a surface-exposed and immunoaccessible protein, and that it is a useful immunogen. These properties are not evident from the sequence alone.

### Example 44

[0586] The following C. pneumoniae protein (PID 4376802) was expressed <SEQ ID 87; cp6802>:

| | |
|---|---|
| 1 | MSNQLQPCIS LGCVSYINSF PLSLQLIKRN DIRCLAPPA |
| | DLLNLLIEGK |
| 51 | LDVALTSSLG AISHNLGYVP GFGIAANQRI LSVNLYAAPT |
| | FFNSPQPRIA |
| 101 | ATLESRSSIG LLKVLCRHLW RIPTPHILRF ITTKVLRQTP |
| | ENYDGLLLIG |
| 151 | DAALQHPVLP GFVTYDLASG WYDLTKLPFV FALLLHSTSW |
| | KEHPLPNLAM |
| 201 | EEALQQFESS PEEVLKEAHQ HTGLPPSLLQ EYYALCQYRL |
| | GEEHYESFEK |
| 251 | FREYYGTLYQ QARL* |

[0587] A predicted signal peptide is highlighted.

[0588] The cp6802 nucleotide sequence <SEQ ID 88> is:

| | |
|---|---|
| 1 | ATGTCTAACC AACTCCAGCC ATGTATAAGC TTAGGCTGCG |
| | TAAGTTATAT |
| 51 | TAATTCCTTT CCGCTGTCCC TACAACTCAT AAAAAGAAAC |
| | GATATTCGCT |
| 101 | GTGTTCTTGC TCCCCCTGCA GACCTCCTCA ACTTGCTAAT |
| | CGAAGGGAAA |
| 151 | CTCGATGTTG CTTTGACCTC ATCCCTAGGA GCTATCTCTC |
| | ATAACTTGGG |
| 201 | GTATGTCCCC GGCTTTGGAA TTGCAGCAAA CCAACGTATC |
| | CTCAGTGTAA |
| 251 | ACCTCTATGC AGCTCCCACT TTCTTTAACT CACCGCAACC |
| | TCGGATTGCC |
| 301 | GCAACTTTAG AAAGTCGCTC CTCThTAGGA CTCTTAAAAG |
| | TGCTTTGTCG |
| 351 | TCATCTCTGG CGCATCCCAA CTCCTCATAT CCTAAGATTC |
| | ATAACTACAA |
| 401 | AAGTACTCAG ACAAACCCCT GAAAATTATG ATGGCCTCCT |
| | CCTAATCGGA |
| 451 | GATCCAGCGC TACAACATCC TGTACTTCCT GGATTTGTAA |
| | CCTATGACCT |
| 501 | TGCCTCGGGG TGGTATGATC TTACAAAGCT ACCTTTTGTA |
| | TTTGCTCTTC |
| 551 | TTCTACACAG CACCTCTTGG AAAGAACATC CCCTACCCAA |
| | CCTTGCGATG |
| 601 | GAAGAAGCCC TCCAACAGTT CGAATCTTCA CCCGAAGAAG |
| | TCCTTAAAGA |
| 651 | AGCTCATCAA CATACAGGTC TGCCCCCTTC TCTTCTTCAA |
| | GAATACTATG |
| 701 | CCCTATGCCA GTACCGTCTA GGAGAAGAAC ACTACGAAAG |
| | CTTTGAAAAA |
| 751 | TTCCGGGAAT ATTATGGAAC CCTCTACCAA CAAGCCCGAC |
| | TGTAA |

[0589] The PSORT algorithm predicts an inner membrane location (0.060).

[0590] The protein was expressed in E. coli and purified as a GST-fusion product, as shown in FIG. 44A. The recombinant protein was used to immunise mice, whose sera were used in a Western blot (FIG. 44B) and for FACS analysis (FIG. 44C). A his-tagged protein was also expressed.

[0591] These experiments show that cp6802 is a surface-exposed and immunoaccessible protein, and that it is a useful immunogen. These properties are not evident from the sequence alone.

### Example 45

[0592] The following C. pneumoniae protein (PID 4376390) was expressed <SEQ ID 89; cp6390>:

| | |
|---|---|
| 1 | MVFSYYCMGL FFFSQAISSC GLLVSLQVGL GLSVLGVLLL |
| | LLAGLLLFKI |
| 51 | QSMLREVPKA PDLLDLEDAS EELRVKASRS LASLPKEISQ |
| | LESYIRSAAN |
| 101 | DLNTIKTWPH KDQRLVETVS RKLERLAAAQ NYMISELCEI |
| | SEILEEEEHH |
| 151 | LILAQESLEW IGKSLFSTFL DMESFLNLSH LSEVRPYLAV |
| | NDPRLLEITE |
| 201 | ESWEVVSHFI NVTSAFKKAQ ILFKNNEHSR MKKKLESVQE |
| | LLETFIYKSL |
| 251 | KRSYRELGCL SEKMRIIHDN PLFPWVQDQQ KYAHAKNEFG |
| | EIARCLEEFE |
| 301 | KTEFWLDEBC AISYMDCWDF LNESIQNKKS RVDRDYISTK |
| | KIALKDRART |
| 351 | YAKVLLEENP TTEGKIDLQD AQRAFERQSQ EFYTLEHTET |
| | KVRLEALQQC |
| 401 | FSDLREATNV RQVRFTNSEN ANDLKESFEK IDKERVRYQK |
| | EQRLYWETID |
| 451 | RNEQELREEI GESLRLQNRR KGYRAGYDAG RLKGLLRQWK |
| | KNLRDVEAHL |
| 501 | EDATMDFEHE VSKSELCSVR ARLEVLEEEL MDMSPKVADI |
| | EELLSYEERC |
| 551 | ILPIRENLER AYLQYNKCSE ILSKAKFFFP EDEQLLVSEA |
| | NLREVGAQLE |
| 601 | QVQGKCQERA QKFAIFEKHI QEQKSLIKEQ VRSFDLAGVG |
| | FLKSELLSIA |
| 651 | CNLYIKAVVK ESIPVDVPCM QLYYSYYEDN EAVVRNRLLN |
| | MTERYQNFKR |
| 701 | SLUSIQFNGD VLLRDPVYQP EGHETRLKER ELQETTLSCK |
| | KLKVAQDRLS |
| 751 | ELESRLSRR |

[0593] A predicted signal peptide is highlighted.

[0594] The cp6390 nucleotide sequence <SEQ ID 90> is:

| | |
|---|---|
| 1 | TTGGTATTCT CATACTATTG CATGGGATTA TTTTTTTTCT |
| | CTGGAGCTAT |
| 51 | TTCTAGTTGT GGTCTTTTAG TGTCTCTAGG AGTTGGTTTA |
| | GGACTTAGTG |
| 101 | TTTTAGGAGT ACTTTTACTT CTCTTAGCAG GTCTTTTGCT |
| | TTTTAAGATC |
| 151 | CAAAGTATGC TTCGAGAGGT GCCTAAGGCT CCTGATCTAT |
| | TAGATTTAGA |
| 201 | AGAPGCAAGT GAACGGCTTA GAGTAAAGGC TAGCCGTTCT |
| | TTACCAAGCC |
| 251 | TCCCGAAGGA AATCAGTCAG CTAGAGAGCT ACATTCGTTC |
| | TGCAGCTAAT |
| 301 | GATCTAAATA CAATTAAGAC TTGGCCGCAT AAAGATCAAA |
| | GACTCGTCGA |
| 351 | GACCGTGTCA CQAAAATTAG AGCGTCTGGC AGCTGCTCAA |
| | AACTATATGA |
| 401 | TTTCTGAACT CTGCGAGATT AGTGAGATTC TTGAGGAAGA |
| | GGAGCATCAT |
| 451 | CTAATTTTGG CTCAGGAATC TCTAGAATGG ATAGGTAAGA |
| | GTCTATTTTC |
| 501 | TACCTTTCTG GACATGGAAT CTTTTTTAAA TTTGAGCCAT |
| | CTATCTGAAG |
| 551 | TGCGTCCGTA CTTAGCTGTA AATGATCCTA GATTATTAGA |
| | AATTACCGAA |
| 601 | GAATCTTGGG AAGTAGTGAG TCATTTCATA AATGTAACGT |
| | CTGCTTTTAA |
| 651 | GAAAGCTCAG ATTCTTTTTA AGAACAACGA ACATTCTCGG |
| | ATGAAGAAGA |
| 701 | AGTTAGAAAG TGTTCAAGAG TTACTGGAAA CATTTATTTA |
| | TAAGAGTTTA |
| 751 | AAGAGAAGTT ATCGAGAATT AGGATGCTTA AGTGAAAAGA |
| | TGAGAATCAT |
| 801 | TCACGACAAT CCTCTCTTCC CTTGGGTGCA AGATCAGCAG |
| | AAGTATGGTC |
| 851 | ATGCTAAGAA TGAATTTGGA GAGATTGGGA GGTGTTTAGA |
| | GGAGTTTGAA |
| 901 | AAGACGTTCT TCTGGTTGGA TGAGGAGTGT GCTATTTCTT |
| | ACATGGACTG |
| 951 | TTGGGATTTT CTAAATGAGT CTATTCAGAA TAAGAAGTCC |
| | AGAGTAGATC |
| 1001 | GAGATTATAT ATCCACGAAG AAAATTGCAT TAAAGGATAG |
| | AGCCCGCACT |
| 1051 | TATGCTAAGG TTCTTTTAGA AGAGAATCCG ACTACAGAGG |
| | GTAAAATAGA |
| 1101 | TTTGCAAGAC GCTCAAAGAG CCTTTGAGOG TCAAAGTCAG |
| | GAGTTTTATA |
| 1151 | CACTAGAGCA TACGGAAACA AAGGTGAGAC TAGAAGCACT |
| | TCAACAGTGC |
| 1201 | TTCTCGGATC TTAGGGAGGC GACGAACGTA AGGCAAGTTA |
| | GGTTTACAAA |
| 1251 | TTCTGAAAAT GCGAATGATT TAAAGGAGAG TTTCGAGAAG |
| | ATAGATAAAG |
| 1301 | AGCGTGTGCG ATATCAAAAA GAGCAAAGGC TCTATTGGGA |
| | AACAATAGAT |
| 1351 | CGCAATGAGC AAGAGCTTAG GGAAGAGATT GGGGAGTCGC |
| | TTCGTTTACA |
| 1401 | AAATCGGAGA AAAGGGTATA GGGCTGGATA TGATGCTGGG |
| | CGTTTAAAAG |
| 1451 | GTTTGTTGCG TCAGTGGAAG AAAAAACTCC GCGATGTGGA |
| | AGCCCACCTT |
| 1501 | GAAGATGCAA CTATGGATTT TGAGCATGAA GTAAGCAAGA |
| | GCGAATTGTG |
| 1551 | CAGTGTTCGG GCGAGGCTCG AGGTTCTAGA AGAAGAGCTG |
| | ATGGATATGT |
| 1601 | CTCCTAAAGT TGCGGATATA GAAGAGTTGT TGTCCTATGA |
| | AGAGCGTTGT |
| 1651 | ATTCTTCCTA TTAGGGAAAA TTTAGAAAGG GCATACCTCC |
| | AATATAATAA |
| 1701 | GTGTTCTGAA ATTTTATCCA AGGCAAAGTT CTTCTTTCCG |
| | GAAGACGAGC |
| 1751 | AATTGCTAGT TTCGGAAGCG AATCTAAGAG AGGTGGGTGC |
| | CCAGTTAAAA |
| 1801 | CAAGTACAGG GAAAATGTCA AGAGAGGGCC CAAAAGTTCG |
| | CAATATTTGA |
| 1851 | AAAGCATATT CAGGAGCAGA AAAGCCTTAT TAAAGAGCAA |
| | GTGCGGAGTT |
| 1901 | TTGATCTAGC GGGAGTTGGG TTTTTAAAGA GTGAGCTTCT |
| | TAGTATTGCT |
| 1951 | TGTAACCTTT ATATAAAGGC GGTTGTTAAG GAGTCTATAC |
| | CAGTTGATGT |
| 2001 | GCCTTGTATG CAGTTATATT ATAGTTATTA CGAAGATAAT |
| | GAAGCTGTAG |
| 2051 | TGCGAAACCG CCTTTTAAAT ATGACGGAGA GGTATCAAAA |
| | TTTTAAAAGG |
| 2101 | AGTTTGAATT CCATACAATT TAATGGTGAC GTTCTTTTAC |
| | GGGATCCGGT |
| 2151 | CTATCAACCT GAAGGTCATG AGACCAGGCT AAAGGAACGG |
| | GAGCTACAAG |
| 2201 | AAACAACTTT GTCTTGTAAG AAATTAAAAG TGGCTCAAGA |
| | TCGTCTTTCT |
| 2251 | GAATTAGAGT CAAGGCTGTC TAGGAGATAG |

[0595] The PSORT algorithm predicts a periplasmic location (0.932).

[0596] The protein was expressed in E. coli and purified as a GST-fusion product, as shown in FIG. 45A. The recombinant protein was used to immunise mice, whose sera were used in a Western blot (FIG. 45B) and for FACS analysis (FIG. 45C). A his-tagged protein was also expressed.

[0597] This protein also showed good cross-reactivity with human sera, including sera from patients with pneumonitis.

[0598] These experiments show that cp6390 is a surface-exposed and immunoaccessible protein, and that it is a useful immunogen. These properties are not evident from the sequence alone.

### Example 46

[0599] The following C. pneumoniae protein (PID 4376272) was expressed <SEQ ID 91; cp6272>:

| | |
|---|---|
| 1 | MKRCFLFLAS FVLMGSSADA LTHQEAVKKK NSYLSHFKSV |
| | SGIVTIEDGV |
| 51 | LNIHNNLRIQ ANKVYVENTV GQSLKLVAHG NVMVNYTAKT |
| | LVCDYLEYYE |
| 101 | DTDSCLLTNG RPMIYPWFLG GSMITLTPET IVIRRGYIST |
| | SEGPKKDLCL |
| 151 | SGDYLEYSSD SLLSIGKTTL RVCRIPILFL PPFSIMPMEI |
| | PKPPINFRGG |
| 201 | TGGFLGSYLG MSYSPISRKR FSSTFFLDSF FKHGVGMGFN |
| | LHCSQKQVPE |
| 251 | NVFNMKSYYA HRLAIDMAEA HDRYRLHGDF CFTHKHVNFS |
| | GEYHLSDSWE |
| 301 | TVADIFPNNF MLKNTGPTRV DCTWNDNYFE GYLTSSVKVN |
| | SFQNANQELP |
| 351 | YLTLRQYPIS IYNTGVYLBN IVECGYLNFA FSDHIVGBNF |
| | SSLRLAARPK |
| 401 | LHKTVPLPIG TLSSTLGSSL IYYSDVPEIS SRHSQLSAKL |
| | QLDYRFLLHK |
| 451 | SYIQRRHIIE PFVTFITETR PLAKNEDHYI FSIQDAFHSL |
| | NLLKAGIDTS |
| 501 | VLSKTNPRFP RIHAKLWTTH ILSNTESKPT FPKTACELSL |
| | PFGKKNTVSL |
| 551 | DAEWIWKKHC WDHMNIRWEW IGNDNVAMTL ESLHRSKYSL |
| | IKCDRENFIL |
| 601 | DVSRPIDQLL DSPLSDHPNL ILGKLFVRPH PCWNYRLSLR |
| | YGWHRQDTPN |
| 651 | YLEYQMILGT KIFEHWQLYG VYERREADSR FFFFLKLDKP |
| | KKPPF* |

[0600] A predicted signal peptide is highlighted.

[0601] The cp6272 nucleotide sequence <SEQ ID 92> is:

| | |
|---|---|
| 1 | ATGAAACGTT GCTTCTTATT TCTAGCTTCC TTTGTTCTTA |
| | TGGGTTCCTC |
| 51 | AGCTGATGCT TTGACTCATC AAGAGGCTGT GAAAAAGAAA |
| | AACTCCTATC |
| 101 | TTAGTCACTT TAAGAGTGTT TCTGGGATTG TQACCATCGA |
| | AGATGGGGTA |
| 151 | TTGAATATCC ATAACAACCT GCGGATACAA GCCAATAAAG |
| | TGTATGTAGA |
| 201 | AAATACTGTG GGTCAAAGCC TGAAGCTTGT CGCACATGGC |
| | AATGTTATGG |
| 251 | TGAACTATAG GGCAAAAACC CTAGTTTGTG ATTACOTAGA |
| | GTATTACGAA |
| 301 | GATACAGACT CTTGTCTTCT TACTAATGGA AGATTCGCGA |
| | TGTATCCTTG |
| 351 | GTTTCTAGGG GGGTCTATGA TCACTCTAAC CCCAGAAACC |
| | ATAGTCATTC |
| 401 | GGAAGGGATA TATCTCTACC TCCGAGGGTC CCAAAAAAGA |
| | CCTGTGCCTC |
| 451 | TCCGGAGATT ACCTGGAATA TTCTTCAGAT AGTCTTCTTT |
| | CTATAGGGAA |
| 501 | GACAACATTA AGGGTGTGTC GCATTCCGAT ACTTTTCTTA |
| | CCTCCATTTT |
| 551 | CTATCATGCC TATGGAGATC CCTAAGCCTC CGATAAACTT |
| | TCGAGGAGGA |
| 601 | ACAGGAGGAT TTCTGGGATC CTATTTGGGG ATGAGCTACT |
| | CGCCGATTTC |
| 651 | TAGGAAGCAT TTCTCCTCGA CATTTTTCTT GGATAGCTTT |
| | TTCAAGCATG |
| 701 | GCGTCGGCAT GGGATTCAAC CTCCATTGTT CTCAGAAGCA |
| | GGTTCCTGAG |
| 751 | AATGTCTTCA ATATGAAAAG CTATTATGCC CACCGCCTTG |
| | CTATCGATAT |
| 801 | GGCAGAAGCT CATGATCGCT ATCGCCTACA CGGAGATTTC |
| | TGCTPCACGC |
| 851 | ATAAGCATGT AAATTTTTCT GGAGAATACC ATCTCAGCGA |
| | TAGTTGGGAA |
| 901 | ACTGTTGCTG ACATTTTCCC CAACAACTTC ATGTTGAAAA |
| | ATACAGGCCC |
| 951 | CACACGTGTC GATTGCACTT GGAATGACAA CTATTTTGAA |
| | GGGTATCTCA |
| 1001 | CCTCTTCTGT TAAGGTAAAC TCTTTCCAAA ATGCCAACCA |
| | AGAGCTCCCT |
| 1051 | TATTTAAQAT TAAGGCAGTA CCCGATTTCT ATTTATAATA |
| | CGGGAGTGTA |
| 1101 | CCTTGAAAAC ATCGTAGAAT GTGGGTATTT AAACTTPGCT |
| | TTTAGCGATC |
| 1151 | ATATCGTTGG CGAGAATTTC TCTTCACTAC GTCTTGCTGC |
| | GCGCCCTAAG |
| 1201 | CTCCATAAAA CTGTGCCTCT ACCTATAGGA ACGCTCTCCT |
| | CCACCCTAGG |
| 1251 | GAGTTCTCTG ATTTACTATA GCGATGTTCC TGAGATCTCC |
| | TCGCGCCATA |
| 1301 | GTCAGCTTTC CGCGAAGCTA CAACTTGATT ATCGCTTTCT |
| | ATTACATAAG |
| 1351 | TCCTACATTC AAAGACGCCA TATTATAGAG CCGTTCGTTA |
| | CCTTCATTAC |
| 1401 | AGAGACTCGT CCTCTAGCTA AGAATGAAGA TCATTATATC |
| | TTTTCTATTC |
| 1451 | AAGATGCCTT TCACTCCTTA AACCTTCTGA AAGCGGGTAT |
| | AGATACCTCG |
| 1501 | GTACTGAGTA AGACTAACCC TCGATTCCCG AGAATCCATG |
| | CGAAGCTGTG |
| 1551 | GACTACCCAC ATCTTGAGCA ATACAGAAAG CAAACCCACG |
| | TTTCCCAAAA |
| 1601 | CTGCATGCGA GCTATCTCTA CCTTTTGGAA AGAAAAATAC |
| | AGTCTCCTTA |
| 1651 | GATGCTGAAT GGATTTGGAA AAAGCACTGT TGGGATCACA |
| | TGAACATACG |
| 1701 | TTGGGAGTGG ATCGGAAATG ACAATGTGGC TATGACTCTA |
| | GAATCCCTGC |
| 1751 | ATAGAAGCAA ATACAGCCTG ATTAAGTGTG ACAGGGAGAA |
| | CTTCATTTTA |
| 1801 | GATGTCAGCC GTCCCATTGA CCAGCTTTTA GACTCCCCTC |
| | TCTCTGATCA |
| 1851 | TAGGAATCTC ATTTTAGGGA AATTATTTGT ACGACCTCAT |
| | CCCTGTTGGA |
| 1901 | ATTACCGCTT ATCCTTACGC TATGGCTGGC ATCGCCAGGA |
| | CACTCCGAAC |
| 1951 | TACCTAGAAT ACCAGATGAT TCTAGGGACG AAGATCTTCG |
| | AACATTGGCA |
| 2001 | GCTCTATGGG GTGTATGAAC GCCGAGAAGC AGATAGTCGA |
| | TTTTTCTTCT |
| 2051 | TCTTAAAGCT CGACAAACCT AAAAAACCTC CCTTCTAA |

[0602] The PSORT algorithm predicts an outer membrane location (0.48).

[0603] The protein was expressed in E. coli and purified as a GST-fusion product, as shown in FIG. 46A. The recombinant protein was used to immunise mice, whose sera were used in a Western blot and for FACS analysis (FIG. 46B). A his-tagged protein was also expressed.

[0604] This protein also showed good cross-reactivity with human sera, including sera from patients with pneumonitis.

[0605] These experiments show that cp6272 is a surface-exposed and immunoaccessible protein, and that it is a useful immunogen. These properties are not evident from the sequence alone.

### Example 47

[0606] The following C. pneumoniae protein (PID 4377111) was expressed <SEQ ID 93; cp7111>:

| | |
|---|---|
| 1 | MFEAVIADIQ AREILDSRGY PTLHVKVTTS TGSVGEARVP |
| | SGASTGKKEA |
| 51 | LEFRDTDSPR YQGKGVLQAV KNVKEILFPL VKGCSVYBQS |
| | LIDSLMMDSD |
| 101 | GSPNKWPLGA NAILGVSLAT AHAAAATLRR PLYRYLGGCF |
| | ACSLPCPMNN |
| 151 | LINGGMHADN GLEFQEFMIR PIGASSIKEA VNMGADVFHT |
| | LKKLLRERGL |
| 201 | STGVGDEGGF APNLASNEEA LELLLLAIEK AGFTPGKDIS |
| | LALDCAASSF |
| 251 | YNVKTGTYDG RHYBEQIAIL SNLCDRYPID SIEDGLAEED |
| | YDGWALLTEV |
| 301 | LGEKVQIVGD DLFVTNPELI LEGISNGLAN SVLIKPNQIG |
| | TLTETVYAIK |
| 351 | LAQMAGYTTI ISHRSGETTD TTIADLAVAF NAGQIKTGSL |
| | SRSERVAKYN |
| 401 | RLMEIEEELG SEAIFTDSNV FSYEDSEE* |

[0607] A predicted signal peptide is highlighted.

[0608] The cp7111 nucleotide sequence <SEQ ID 94> is:

| | |
|---|---|
| 1 | ATGTTTGAAG CTGTCATTGC CGATATCCAG GCTAGGGAAA |
| | TCTTGGATTC |
| 51 | TCGCGGGTAT CCCACTTTAC ATGTTAAAGT AACCACTAGC |
| | ACAGGTTCTG |
| 101 | TTGGAGAAGC TCGGGTTCCT TCAGGAGCAT CCACAGGGAA |
| | AAAAGAAGCC |
| 151 | TTAGAGTTTC GTGATACAGA TTCTCCTCGT TATCAAGGCA |
| | AAGGGGTTTT |
| 201 | GCAAGCTGTA AAAAACGTAA AAGAAATTCT TTTTCCCCTC |
| | GTCAAGGGAT |
| 251 | GTAQTGTTTA TGAGCAATCC TTAATTGATT CTCTGATGAT |
| | GGATTCTGAC |
| 301 | GGCTCTCCGA ACAAAGAAAC TCTAGGGGCC AATGCTATTT |
| | TAGGAGTCTC |
| 351 | TCTAGCTACA GCACATGCAG CAGCAGCAAC ACTACGCAGA |
| | CCTCTGTATC |
| 401 | GTTATTTAGG AGGGTGTTTT GCCTGCAGTC TTCCCTGTCC |
| | TATGATGAAT |
| 451 | CTGATCAATG GAGGCATGCA TGCCGATAAC GGCTTGGAGT |
| | TCCAAGAATT |
| 501 | TATGATCCGT CCTATTGGAG CCTCTTCCAT CAAAGAAGCT |
| | GTCAACATGG |
| 551 | GTGCTGACGT TTTTCATACT TTGAAAAAAT TACTCCATGA |
| | AAGAGGCTTA |
| 601 | TCTACTGGAG TGGGTGACGA AGGAGGCTTC GCCCCGAATC |
| | TTGCTTCTAA |
| 651 | TGAAGAAGCT CTAGAGCTCC TAPTGCTGGC TATTGAAAAA |
| | GCAGGCTTTA |
| 701 | CTCCAGGAAA AGATATATCG CTAGCCTTAG ACTGCGCAGC |
| | ATCCTCATTC |
| 751 | TATAACGTAA AAACAGGCAC GTATGATGOG AGGCACTATG |
| | AAGAGCAAAT |
| 801 | CGCAATCCTT TCTAATTTAT GTGATCGCTA TCCTATAGAC |
| | TCCATAGAAG |
| 851 | ATGGTCTTGC TGAAGAAGAC TATGACGGGT GGGCCTTGTT |
| | AACTGAAGTT |
| 901 | CTTGGAGAAA AAGTACAGAT TGTGGGTGAT GACCTATTTG |
| | TTACAAATCC |
| 951 | GGAATTAATA TTAGAGGGTA TTAGCAATGG ATTAGCGAAC |
| | TCTGTGTTGA |
| 1001 | TTAAACCAAA TCAGATAGGG ACGCTTACTG AAACAGTGTA |
| | TGCTATCAAG |
| 1051 | CTTGCGCAAA TGGCTGGCTA TACTACAATT ATTTCTCATC |
| | GCTCAGGAGA |
| 1101 | AACTACGGAC ACTACGATTG CAGATCTTGC TGTTGCCTTC |
| | AACGCCGGTC |
| 1151 | AAATCAAAAC AGGCTCTTTA TCACGTTCTG AGCGTGTTGC |
| | AAAATACAAT |
| 1201 | AGACTCATGG AAATTGAAGA AGAGCTTGGA TCCGAAGCAA |
| | TTTTCACAGA |
| 1251 | TTCTAATGTA TTTTCTTAC GAGGATTCT GAGGAATAG |

[0609] The PSORT algorithm predicts an inner membrane location (0.100).

[0610] The protein was expressed in E. coli and purified as a GST-fusion product, as shown in FIG. 47A. The recombinant protein was used to immunise mice, whose sera were used in a Western blot (FIG. 47B) and for FACS analysis (FIG. 47C). A his-tagged protein was also expressed.

[0611] The cp7111 protein was also identified in the 2D-PAGE experiment and showed good cross-reactivity with human sera, including sera from patients with pneumonitis.

[0612] These experiments show that cp7111 is a surface-exposed and immunoaccessible protein, and that it is a useful immunogen. These properties are not evident from the sequence alone.

### Example 48

[0613] The following C. pneumoniae protein (PID 4455886) was expressed <SEQ ID 95; cp0010>:

| | |
|---|---|
| 1 | MKSQFSWLVL SSTLACDFTSC STVFAATAEN IGPSDSFDGS |
| | TNTGTYTPKN |
| 51 | TTTGIDYTLT GDITLQNLGD SAALTKGCFS DTTESLSFAG |
| | KGYSLSFLNI |
| 101 | KSSAEGAALS VTTDKNLSLT GFSSLTFLAA PSSVITTPSG |
| | KGAVKCGGDL |
| 151 | TFDNNGTILF KQDYCEENGG AISTKNLSLK NSTGSISFEG |
| | NKSSATGKKG |
| 201 | GAICATGTVD ITNNTAPTLF SNNIAEAAGG AINSTGNCTI |
| | TGNTSLVFSE |
| 251 | NSVTATAGNG GALSGDADVT ISGNQSVTFS GNQAVANGGA |
| | IYAKKLTLAS |
| 301 | GGGGVSPFLT IIVQGTTAGN GGAISILAAG ECSLSAEAGD |
| | ITFNGNAIVA |
| 351 | TTPQTTKENS IDIGSTAKIT NLRAISGHSI FFYDPITANT |
| | AADSTDTLNL |
| 401 | NKADAGNSTD YSGSIVFSGE KLSEDEAXVA DNLTSTLKQP |
| | VTLPAGNINL |
| 451 | KRGVTLDTKG FTQTAGSSVI MDAGTTLKAS TEEVTLTOLS |
| | IPVDSLGEGK |
| 501 | KVVIAASAAS KNVALSGPEL LLDNQGNAYE NHDLGKTQDF |
| | SFVQLSALGT |
| 551 | ATTTDVPAVP TVATPTHYGY QGTWGMTWVD DTASTPKTKT |
| | ATLAWTNTGY |
| 601 | LPNPBRQGPL VPNSLWGSFS DIQAIQQVIE RSALTLCSDR |
| | GFWAAGVANF |
| 651 | LDKDKRGEKR KYRHKSGGYA IGGAAQTCSE NLISFAFCQL |
| | FGSDKDFLVA |
| 701 | KNHTDTYAGA FYIQHITECS GFIGCLLDKL PGSWSHKPLV |
| | LEGQLAYSHV |
| 751 | SNDLRTKYTA YPEVKGSWGN NAFNMMLGAS SHSYPEYLHC |
| | FDTYAPYIKL |
| 801 | NLTYIRQDSF SEKGTEGRSF DDSNLFNLSL PIGVKFEKFS |
| | DCNDFSYDLT |
| 851 | LSYVPDLIRN DPKCTTALVI SGASWETYAN NLARQALQVR |
| | AGSHYAFSPM |
| 901 | FEVLGQFVFE VRGSSRIYNV DLGGKFQF* |

[0614] A predicted signal peptide is highlighted.

[0615] The cp0010 nucleotide sequence <SEQ ID 96> is:

| | |
|---|---|
| 1 | ATGAAATCGC AATTTTCCTG GTTAGTGCTC TCTTCGACAT |
| | TGGCATGTTT |
| 51 | TACTAGTTGT TCCACTGTTT TTGCTGCAAC TGCTGAAAAT |
| | ATAGGCCCCT |
| 101 | CTGATAGCTT TGACGGAAGT ACTAACACAG GCACCTATAC |
| | TCCTAAAAAT |
| 151 | ACGACTACTG GAATAGACTA TACTCTGACA GGAGATATAA |
| | CTCTGCAAAA |
| 201 | CCTTCCGGAT TCGGCAGCTT TAACGAAGGG TTGTTTTTCT |
| | GACACTACGG |
| 251 | AATCTTTAAG CTTTGCCGGT AAGGGGTACT CACTTTCTTT |
| | TTTAAATATT |
| 301 | AAGTCTAGTG CTGAAGGCGC AGCACTTTCT GTTACAACTG |
| | ATAAAAATCT |
| 351 | GTCGCTAACA GGATTTTCGA GTCTTACTTT CTTAGCGGCC |
| | CCATCATCGG |
| 401 | TAATCACAAC CCCCTCAGGA AAAGGTGCAG TTAAATGTGG |
| | AGGGGATCTT |
| 451 | ACATTTGATA ACAATGGAAC TATTTTATTT AAACAAGATT |
| | ACTGTGAGGA |
| 501 | AAATGGCGGA GCCATTTCTA CCAAGAATCT TTCTTTGAAA |
| | AACAGCACGG |
| 551 | GATCGATTTC TTTTCAAGGG AATAAATCGA GCGCAACAGG |
| | GAAAAAAGGT |
| 601 | GGGGCTATTT GTGCTACTGG TACTGTAGAT ATTACAAATA |
| | ATACGGCTCC |
| 651 | TACCCTCTTC TCGAACAATA TTGCTGAAGC TGCAGGTGGA |
| | GCTATAAATA |
| 701 | GCACAGGAAA CTGTACAATT ACAGGGAATA CGTCTCTTGT |
| | ATTTTCTGAA |
| 751 | AATAGTGTGA CAGCGACCGC AGGAAATGGA GGAGCTCTTT |
| | CTGGAGATGC |
| 801 | CQATGTTACC ATATCTGGGA ATCAGAGTGT AACTTTCTCA |
| | GGAAACCAAG |
| 851 | CTGTAGCTAA TGGCGGAGCC ATTTATGCTA AGAAGCTTAC |
| | ACTGGCTTCC |
| 901 | GGGGGGGGGG GGGTATCTCC TTTTCTAACA ATAATAGTCC |
| | AAGGTACCAC |
| 951 | TGCAGGTAAT GGTGGAGCCA TTTCTATACT GGCAGCTGGA |
| | GAGTGTAGTC |
| 1001 | TTTCAGCAGA AGCAGGGGAC ATTACCTTCA ATGGGAATGC |
| | CATTGTTGCA |
| 1051 | ACTACACCAC AAACTACAAA AAGAAATTCT ATTGACATAG |
| | GATCTACTGC |
| 1101 | AAAGATCACG AATTTACGTG CAATATCTGG GCATAGCATC |
| | TTTTTCTACG |
| 1151 | ATCCGATTAC TGCTAATACG GCTGCGGATT CTACAGATAC |
| | TTTAAATCTC |
| 1201 | AATAAGGCTG ATGCAGGTAA TAGTACAGAT TATAGTGGGT |
| | CGATTGTTTT |
| 1251 | TTCTGGTGAA AAGCTCTCTG AAGATGAAGC AAAAGTTGCA |
| | GACAACCTCA |
| 1301 | CTTCTACGCT GAAGCAGCCP GTAACTCTAA CTGCAGGAAA |
| | TTTAGTACTT |
| 1351 | AAACGTGGTG TCACTCTCGA TACGAAAGGC TTTACTCAGA |
| | CCGCGGGTTC |
| 1401 | CTCTGTTATT ATGGATGCGG GCACAACGTT AAAAGCAAGT |
| | ACAGAGGAGG |
| 1451 | TCACTTTAAC AGGTCTTTCC ATTCCTGTAG ACTCTTTAGG |
| | CGAGGGTAAG |
| 1501 | AAAGTTGTAA TTGCTGCTTC TGCAGCAAGT AAAAATGTAG |
| | CCCTTAGTGG |
| 1551 | TCCGATTCTT CTTTTGGATA ACCAAGGGAA TGCTTATGAA |
| | AATCACGACT |
| 1601 | TAGGAAAAAC TCAAGACTTT TCATTTGTGC AGCTCTCTGC |
| | TCTGGGTACT |
| 1651 | GCAACAACTA CAGATGTTCC AGCGGTTCCT ACAGTAGCAA |
| | CTCCTACGCA |
| 1701 | CTATGGGTAT CAAGGTACTT GGGGAATGAC TTGGGTTGAT |
| | GATACCGCAA |
| 1751 | GCACTCCAAA GACTAAGACA GCGACATTAG CTTGGACCAA |
| | TACAGGCTAC |
| 1801 | CTTCCGAATC CTGAGCGTCA AGGACCTTTA GTTCCTAATA |
| | GCCTTTGGGG |
| 1851 | ATCTTTTTCA GACATCCAAG CGATTCAAGG TGTCATAQAG |
| | AGAAGTGCTT |
| 1901 | TGACTCTTTG TTCAGATCGA GGCTTCTGGG CTGCGGGAGT |
| | CGCCAATTTC |
| 1951 | TTAGATAAAG ATAAGAAAGG GGAAAAACGC AAATACCGTC |
| | ATAAATCTGG |
| 2001 | TGGATATGCT ATCGGAGGTG CAGCGCAAAC TTGTTCTGAA |
| | AACTTAATTA |
| 2051 | GCTTTGCCTT TTGCCAACTC TTTGGTAGCG ATAAAGATTT |
| | CTTAGTCGCT |
| 2101 | AAAAATCATA CTGATACCTA TGCAGGAGCC TTCTATATCC |
| | AACACATTAC |
| 2151 | AGAATGTAGT GGGTTCATAG GTTGTCTCTT AGATAAACTT |
| | CCTCGCTCTT |
| 2201 | GGAGTCATAA ACCCCTCGTT TTAGAAGGGC AGCTCGCTTA |
| | TAGCCACGTC |
| 2251 | AGTAATGATC TGAAGACAAA GTATACTGCG TATCCTGAGG |
| | TGAAAGGTTC |
| 2301 | TTGGGGGGAT AATGCTTTTA ACATGATGTT GGGAGCTTCT |
| | TCTCATTCTT |
| 2351 | ATCCTGAATA CCTGCATTGT TTTGATACCT ATCCTCCATA |
| | CATCAAACTG |
| 2401 | AATCTGACCT ATATACGTCA GGACAGCTTC TCGGAGAAAG |
| | GTACAGAAGG |
| 2451 | AAGATCTTTT GATGACAGCA ACCTCTTCAA TTTATCTTTG |
| | CCTATAGGGG |
| 2501 | TGAAGTTTGA GAAGTTCTCT GATTGTTATG ACTTTTCTTA |
| | TGATCTGACT |
| 2551 | TTATCCTATG TTCCTGATCT TATCCGCAAT GATCCCAAAT |
| | GCACTACAGC |
| 2601 | ACTTGTAATC AGCGGAGCCT CTTGGGAAAC TTATGCCAAT |
| | AACTTAGCAC |
| 2651 | GACAGGCCTT GCAAGTGCGT GCAGGCAGTC ACTACGCCTT |
| | CTCTCCTATG |
| 2701 | TTTGAAGTGC TCGGCCAGTT TGTCTTTGAA GTTCGTGGAT |
| | CCTCACGGAT |

[0616] The PSORT algorithm predicts an outer membrane location (0.922).

[0617] The protein was expressed in E. coli and purified as a GST-fusion product, as shown in FIG. 48A. The recombinant protein was used to immunise mice, whose sera were used in a Western blot (FIG. 48B) and for FACS analysis (FIG. 48C). A his-tagged protein was also expressed.

[0618] The cp0010 protein was also identified in the 2D-PAGE experiment and showed good cross-reactivity with human sera, including sera from patients with pneumonitis.

[0619] These experiments show that cp0010 is a surface-exposed and immunoaccessible protein, and that it is a useful immunogen. These properties are not evident from the sequence alone.

### Example 49

[0620] The following C. pneumoniae protein (PID 4376296) was expressed <SEQ ID 97; cp6296>:

| | |
|---|---|
| 1 | MEEVSEYLQQ VENQLRSCSK RLTKMETFAL GVRLEAKEEI |
| | ESIILSDVVN |
| 51 | RFEVLCRDIE DMLSRVEEIE RMLHMAELPL LPIKRALTKA |
| | EVQHNSCKEK |
| 101 | LTKVEPYFKE SPAYLTSEER LQSLNQTLQR AYKESQKVSG |
| | LESEVRACRB |
| 151 | QLKDQVRQFE TQGVSLIKEE ILFVTSTFRT KFSYHSFRLH |
| | VPCMRLYEEY |
| 201 | YDDIDLERTR ARWMAMSERY RDAFQAPQEM LKEGLVEEAQ |
| | ALRBTEYWLY |
| 251 | REERKSKKKH* |

[0621] The cp6296 nucleotide sequence <SEQ ID 98> is:

| | |
|---|---|
| 1 | ATGGAGGAGG TGTCTGAGTA TCTTCAGCAA GTAGAAAATC |
| | AGTTGGAATC |
| 51 | CTGTTCCAAG CGATTAACCA AGATGGAAAC TTTTGCCTTA |
| | GGTGTGAGGT |
| 101 | TGGAAGCTAA AGAAGAGATA GAGTCTATCA TACTTTCTGA |
| | TGTAGTGAAC |
| 151 | CGTTTTGAGG TTTTATGTAG AGATATTGAA GATATGCTAT |
| | CTCGAGTCGA |
| 201 | GGAGATAGAG CGGATGTTAC GTATGGCGGA GCTTCCTCTA |
| | CTTCCTATAA |
| 251 | AAGAAGCGCT TACCAAGGCT TTTGTACAAC ATAACAGCTG |
| | TAAAGAGAAG |
| 301 | TTAACCAAGG TAGAGCCTTA CTTTAAAGAG AGCCCTGCAT |
| | ATCTAACTAG |
| 351 | TGAAGAGCGA TTGCAGAGTT TGAATCAGAC TTTACAACGT |
| | GCGTACAAAG |
| 401 | AGTCCCAAAA GGTTTCAGGT TTAGAATCGG AAGTGAGAGC |
| | CTGTCGAGAG |
| 451 | CAGCTTAAAG ATCAAGTAAG ACAGTTTGAA ACTCAAGGAG |
| | TGAGCTTGAT |
| 501 | AAAAGAAGAG ATTCTCTTTG TGACTAGTAC CTTTAGAACT |
| | AAATTTAGCT |
| 551 | ATCATTCATT TCGATTACAT GTTCCTTGCA TGAGGTTGTA |
| | TGAGGAGTAT |
| 601 | TATGATGACA TTGATCTAGA GAGAACTCGA GCTCGATGGA |
| | TGGCGATGTC |
| 651 | TGAGAGGTAT AGAGATGCTT TTCAGGCATT CCAGGAGATG |
| | TTGAAGGAAG |
| 701 | GCCTAGTTGA AGAAGCTCAG GCTCTTTAGG AAACCGAGTA |
| | CTGGTTATAT |
| 751 | CGAGAGGAGA GAAAGAGTAA AAAGAAACAT TGA |

[0622] The PSORT algorithm predicts a cytoplasmic location (0.523).

[0623] The protein was expressed in E. coli and purified as a GST-fusion product, as shown in FIG. 49A. The recombinant protein was used to immunise rice, whose sera were used in a Western blot (FIG. 49B) and for FACS analysis (FIG. 49C). A his-tagged protein was also expressed.

[0624] These experiments show that cp6296 is a surface-exposed and immunoaccessible protein, and that it is a useful immunogen. These properties are not evident from the sequence alone.

### Example 50

[0625] The following C. pneumoniae protein (PID 4376664) was expressed <SEQ ID 99; cp6664>:

| | |
|---|---|
| 1 | MVLFHAQASG RWRVKADAIV LPFWHFKDAK NAASFEAEFE |
| | PSYLPALENF |
| 51 | QGKTGEIELL YSSPKMCEKR IVLLGLGKNE ELYDFBBGWY |
| | YATLTRVLRK |
| 101 | AKCSTVNIIL PTISELRLSA EEFLVGLSSG ILSLNYDYPR |
| | YNKVDRNLET |
| 151 | PLSKVTVIGI VPKMADAIFR KEAAIFEGVY LTRDLVNRNA |
| | DEITPKKLAE |
| 201 | VALNLGKEFP SIDTKVLGKD AIAKEKMGLL LAVSKGSCVD |
| | PHFIVVRYQG |
| 251 | RPKSKDHTVL IGKGVTFDSG GLDLKPGKSM LTMKEDMAGG |
| | ATVLGILSAL |
| 301 | AVLELPINVT GIIPATENAI DGASYKMGDV YVGNSGLSVE |
| | ICSTDAEGRL |
| 351 | ILADAITTAL KYCKPTRIID FATLTGAMVV SLGEEVAGFF |
| | SNNDVLAEDL |
| 401 | LEASAETSEP LWRLPLVKKY DKTLHSDIAD MENLGSNRAG |
| | AITAALFLQR |
| 451 | FLEESSVAWA HLDIAGTAYH EKEEDRYPKY ASGFCVRSIL |
| | YYLENSLSK* |

[0626] The cp6664 nucleotide sequence <SEQ ID 100> is:

| | |
|---|---|
| 1 | GTGGTTTTAT TTCATGCTCA AGCCTCTGGG CGTAATCGTG |
| | TTAAGGCAGA |
| 51 | TGCTATAGTC CTGCCCTTTT GGCATTTTAA GGATGCAAAA |
| | AATGCAGCTT |
| 101 | CTTTTGAAGC CGAGTTTGAA CCCTCGTATC TCCCCGCTTT |
| | AGAAAACTTT |
| 151 | CAAGGAAAAA CCGGGGAGAT TGAACTCCTT TATAGTAGTC |
| | CTAAAGCTAA |
| 201 | GGAAAAACGC ATTGTCCTCT TAGGCTTAGG GAAAAATGAA |
| | GAGCTCACCT |
| 251 | CTGATGTTGT TTTCCAAACc TATGCGACAC TAACTCGTGT |
| | CTTACGTAAA |
| 301 | GCAAAGTGTT CCACAGTCAA TATCATCTTA CCTACAATTT |
| | CTGAATTGCC |
| 351 | GCTTTCTGCC GAAGAATTCT TAGTGGGGTT GTCCTCAGGA |
| | ATTTTGTCAT |
| 401 | TAAACTATGA CTACCCACGT TATAATAAGG TAGATCGTAA |
| | TCTTGAAACT |
| 451 | CCTCTTTCTA AAGTCACGGT TATCGGTATC GTTCCCAAAA |
| | TGGCGGATGC |
| 501 | TATCTTTAGG AAAGAAGCAG CCATTTTCGA AGGCGTATAT |
| | CTCACTCGAG |
| 551 | ATCTTGTGAA CAGGAATGCT GATGAAATTA CCCCTAAGAA |
| | ATTGGCAGAG |
| 601 | GTTGCTCTGA ATCTGGGAAA AGAGTTCCCT AGTATTGATA |
| | CTAAGGTCTT |
| 651 | GGGAAAAGAT GCCATCGCCA AAGAGAAAAT GGCACTCCTA |
| | TTGGCTGGTT |
| 701 | CCAAGGGTTC TTGTGTGGAT CCACACTTTA TCGTTGTCCG |
| | TTATCAAGGA |
| 751 | CGTCCTAAGT CTAAAGATCA CACCGTCTTG ATAGGGAAAG |
| | GGGTCACTTT |
| 801 | TGACTCTGGA GGTTTAGACC TCAAGCCTGG AAAATCCATG |
| | CTTACTATGA |
| 851 | AAGAAGACAT GGCAGGTGGG GCTACAGTCC TCGGGATTCT |
| | CTCGGCGTTA |
| 901 | GCAGTTTTAG AGCTTCCTAT AAATGTCACG GGGATCATTC |
| | CTGCTACAGA |
| 951 | GAATGCTATC GATGGCGCCT CCTATAAAAT GGGAGATGTC |
| | TATGTAGGAA |
| 1001 | TGTCGGGGCT TTCTGTTGAG ATTTGTAGTA CCGATGCTGA |
| | GGGACGTCTT |
| 1051 | ATCCTCGCTG ATGCGATTAC ATATGCTTTA AAATATTGTA |
| | AACCGACACG |
| 1101 | TATTATAGAT TTTGCAACTC TAACAGGAGC TATGGTAGTC |
| | TCTCTAGGAG |
| 1151 | AAGAGGTTGC AGGTTTCTTT TCCAATAACG ATGTTTTAGC |
| | TGAAGATCTT |
| 1201 | TTAGAGGCGT CAGCCGAAAC CTCCGAGCCG TTATGGAGAC |
| | TTCCTCTAGT |
| 1251 | TAAGAAGTAT GATAAAACAT TGCATTCTGA TATTGCTGAT |
| | ATGAAAAATC |
| 1301 | TAGGCAGTAA CCGTGCAGGG OCTATTACAG CAGCATTATT |
| | CTTGCAGAGA |
| 1351 | TTTTTGGAAG AATCTTCGGT AGCTTGGGCA CATCTTGATA |
| | TTGCAGGTAC |
| 1401 | TGCATATCAT GAAAAAGAAG AAGACCGTTA TCCAAAATAT |
| | GCTTCAGGTT |
| 1451 | TTGGTGTTCG TTCTATTCTT TATTACTTAG AAAATAGTCT |
| | TTCTAAGTAG |

[0627] The PSORT algorithm predicts an inner membrane location (0.268).

[0628] The protein was expressed in E. coli and purified as a GST-fusion (FIG. 50A), as a his-tagged protein, and as a GST/His fusion. The proteins were used to immunise mice, whose sera were used in Western blot Western blot (50B) and FACS (50C) analyses.

[0629] The cp6664 protein was also identified in the 2D-PAGE experiment (Cpn0385) and showed good cross-reactivity with human sera, including sera from patients with pneumonitis.

[0630] These experiments show that cp6664 is a surface-exposed and immunoaccessible protein, and that it is a useful immunogen. These properties are not evident from the sequence alone.

### Example 51

[0631] The following C. pneumoniae protein (PID 4376696) was expressed <SEQ ID 101; cp6696>:

| | |
|---|---|
| 1 | MTLIFVIIIV WCNAFLIKLC VIMGLQSRLQ HCIEVSQNSN |
| | FDSQVKQFIY |
| 51 | ACQDKTLRQS VLKIFRYHPL LRIHDIAEAV YLLMALEEGB |
| | DLGLSFLNVQ |
| 101 | QYPSGAVELP SCGGFPWKGL PYPAEHAEFG LLLLQIAEPY |
| | EESQAYVSKM |
| 151 | SHPQQALFDH QGSVFPSLWS QENSRLLKEK TTLSQSFLFQ |
| | LGMQIHPBYS |
| 201 | LEDPALGFWM QRTRSSSAFV AASGCQSSLG AYSSGDVGVI |
| | AYGPCSGDIS |
| 251 | DCYYFGCCGI AREFVCQKSH QTTEISFLTS TGKPIWRNTG |
| | FSYLRDSYVH |
| 301 | LPIRCRITIS DKQYRVHAAL AEATSAMTFS IFCKGKNCQV |
| | VDGPRLRSCS |
| 351 | LDSYXGPGND IMILGENDAI NIVSASPYME IFALQGKEKF |
| | WNADFLINIP |
| 401 | YKEEGVMLIF EKKVTSEKGR FFTKMN* |

[0632] A predicted signal peptide is highlighted.

[0633] The cp6696 nucleotide sequence <SEQ ID 102> is:

| | |
|---|---|
| 1 | TTGACTCTAA TTTTTGTTAT TATTATCGTT TGGTGCAATG |
| | CTTTTCTGAT |
| 51 | CAAATTGTGC GTGATAATGG GGCTGCAATC CAGGTTACAA |
| | CATTGTATAG |
| 101 | AAGTGTCCCA GAATTCGAAC TTTGATTCAC AAGTAAAACA |
| | GTTPATCTAT |
| 151 | GCGTGCCAAG ATAAGACATT AAGGCAGTCT GTACTCAAGA |
| | TTTTCCGCTA |
| 201 | CCATCCTTTA CTAAAAATTC ATGATATTGC TCGGGCCGTC |
| | TATCTTTTGA |
| 251 | TGGCCTTAGA AGAAGGCGAG GATTTAGGCT TAAGCTTTTT |
| | AAATGTACAG |
| 301 | CAGTACCCTT CAGGTGCTGT AGAACTGTTT TCTTGTGGGG |
| | GATTTCCTTG |
| 351 | GAAAGGATTA CCTTATCCTC CAGAACATGC GGAATTTGGC |
| | CTACTCCTGT |
| 401 | TACAGATCGC AGAGTTTTAT GAAGAGAGTC AGGCATACGT |
| | CTCTAAAATG |
| 451 | AGTCATTTTC AACAGGCACT CTTTGATCAC CAAGGGAGCG |
| | TCTTTCCCTC |
| 501 | TCTCTGGAGC CAGGAGAACT CTCGACTCCT AAAAGAAAAG |
| | ACAACTCTTA |
| 551 | GCCAATCGTT TCTCTTCCAA TTAGGAATGC AAATTCACCC |
| | AGAATACAGT |
| 601 | CTTGAGGATC CTGCACTAGG GTTCTGGATG CAAAGAACGC |
| | GTTCTTCATC |
| 651 | CGCTTTTGTA GCCGCTTCAG GATGTCAAAG TAGCTTGGGA |
| | GCGTATTCCT |
| 701 | CAGGGGATGT CGGTGTTATC GCTTATGGAC CTTGCTCTGG |
| | AGACATTAGT |
| 751 | GATTGTTATT ATTTTGGATG TTGTGGAATC GCTAAAGAGT |
| | TCGTGTGCCA |
| 801 | AAAATCTCAC CAAACTACAG AGATTTCTTT TCTCACCTCT |
| | ACAGGAAAGC |
| 851 | CTCATCCCAG AAATACGGGA TTTTCCTACC TTCGAGATTC |
| | CTATGTACAT |
| 901 | CTGCCGATCC GCTGTAAGAT CACTATTTCC GACAAGCAAT |
| | ATCGCGTGCA |
| 951 | CGCTGCGTTG GCTGAGGCCA CCTCTGCCAT GACGTTTTCT |
| | ATTTTCTGTA |
| 1001 | AGGGGAAGAA TTGTCAGGTT GTTGACGGCC CTCGCTTGCG |
| | CTCCTGTTCC |
| 1051 | CTAGATTCTT ATAAAGGTCC CGGAAACGAC ATTATGATTC |
| | TTGGGGAAAA |
| 1101 | TGACGCAATC AACATTGTTT CTGCAAGTCC CTATATGGAA |
| | ATTTTTGCTT |
| 1151 | TGCAAGGCAA AGAAAAATTT TGGAATGCAG ACTTTTTGAT |
| | TAATATTCCT |
| 1201 | TACAAAGAAG AGGGCGTCAT GTTAATTTTT GAAAAAAAAG |
| | TGACCTCTGA |
| 1251 | GAAAGGAAGA TTCTTTACGA AGATGAATTA A |

[0634] The PSORT algorithm predicts an inner membrane location (0.463).

[0635] The protein was expressed in E. coli and purified as a GST-fusion product, as shown in FIG. 51A. The recombinant protein was used to immunise nice, whose sera were used in a Western blot (FIG. 51B) and for FACS analysis (FIG. 51C). A his-tagged protein was also expressed.

[0636] This protein also showed good cross-reactivity with human sera, including sera from patients with pneumonitis.

[0637] These experiments show that cp6696 is a surface-exposed and immunoaccessible protein, and that it is a useful immunogen. These properties are not evident from the sequence alone.

### Example 52

[0638] The following C. pneumoniae protein (PID 4376790) was expressed <SEQ ID 103; cp6790>:

| | |
|---|---|
| 1 | MSEHXKSSKI IGIDLGTTNS CVSVMEGGQA KVITSSEGTR |
| | TTPSIVAFKG |
| 51 | NEKLVGIPAK RQAVTNPEKT LGSTKRFIGR KYSEVASEIQ |
| | TVPYTVTSGS |
| 101 | KGDAVFEVDG KQYTPEBIGA QILNXMKETA EAYLGETVTE |
| | AVITVPAYFN |
| 151 | DSQRASTRDA GRIAGLDVKR IIPEPTAAAL AYGIDKVGDK |
| | KIAVFDLGGG |
| 201 | TFDISILEIG DGVFEVLSTN GDTLLGGDDF DEVIIKWMIE |
| | EFKKQEGIDL |
| 251 | SKDNMALQRL KDAAEKAXIE LSGVSSTEIN QPFITMDAQG |
| | PKHLALTLTR |
| 301 | AQFEKLAASL IERTKSPCIK ALSDAKLSAK DIDDVLLVGG |
| | MSRMPAVQET |
| 351 | VKELPGKEPN KGVNPDEVVA IGAAIQGGVL GGEVKDVLLL |
| | DVIPLSLGIE |
| 401 | TLGGVMTTLV ERNTTIPTQK KQIFSTAADN QPAVTIVVLQ |
| | GERPMAKDNK |
| 451 | EIGRFDLTDI PPAPRGHPQI EVSFDIDANG IPHVSAKDVA |
| | SGKEQKIRIE |
| 501 | ASSGLQEDEI QRMVRDAEIN KEEDKKRREA SDAKNEADSM |
| | IFRAEKAIKD |
| 551 | YKEQIPETLV KEIEERIENV RNALKDDAPI EKIKEVTEDL |
| | SKHMQKIGES |
| 601 | MQSQSASAAA SSAANAKGGP NINTEDLKKH SFSTKPPSNN |
| | GSSEDHIEEA |
| 651 | DVEIIDNDDK* |

[0639] The cp6790 nucleotide sequence <SEQ ID 104> is:

| | |
|---|---|
| 1 | ATGAGTGAAC ACAAAAAATC AAGCAAAATT ATAGGTATAG |
| | ACTTAGGCAC |
| 51 | AACAAACTCC TGCGTATCTG TTATGGAAGG AGGACAAGCT |
| | AAAGTAATTA |
| 101 | CATCATCCGA AGGAACAAGA ACCACGCCAT CGATCGTTGC |
| | CTTCAAAGGT |
| 151 | AATGAGAAAT TAGTGGGGAT TCCAGCAAAA CGTCAAGCAG |
| | TGACAAATCC |
| 201 | AGAAAAAACT CTCGGCTCTA CAAAACGCTT TATTGGCCGT |
| | AAGTACTCTG |
| 251 | AAGTAGCTTC GGAAATCCAA ACCGTTCCTT ATACAGTCAC |
| | CTCCGGATCT |
| 301 | AAAGGTGATG CCGTTTTCCA AGTTGATGGC AAACAATACA |
| | CTCCAGAAGA |
| 351 | AATTGGCGCA CAAATCTTAA TGAAAATGAA AGAGACACCA |
| | GAAGCTTATC |
| 401 | TAGGCGAAAC TGTCACAGAA GCAGTGATCA CCGTCCCCGC |
| | ATACTTCAAT |
| 451 | GATTCTCAAC GAGCATCCAC AAAAGATGCT GGACGCATTG |
| | CAGGTCTAGA |
| 501 | TGTAAAACGT ATCATTCCAG AACCTACCGC AGCAGCTCTT |
| | GCCTACGGAA |
| 551 | TCGATAAAGT CGGTGATAAA AAAATCGCTG TCTTCCACCT |
| | TGGTGGAGGA |
| 601 | ACTTTTGATA TCTCCATCCT AGAAATCGGT GATGGCGTCT |
| | TCGAAGTTCT |
| 651 | ATCTACAAAT GGAGATACTC TCCTCGGTGG AGACGACTTT |
| | GATGAAGTCA |
| 701 | TTATCAAATG GATGATCGAA GAATTCAAAA AACAAGAAGG |
| | CATTGATCTT |
| 751 | AGCAAAGATA ATATGGCCTT ACAAAGACTT AAAGATGCTG |
| | CTGAGAAAGC |
| 801 | AAAAATAGAA CTTTCAGGAG TCTCTTCCAC AGAAATCAAT |
| | CAGCCATTCA |
| 851 | TCACAATGGA TGCACAAGGA CCTAAACACC TTGCATTGAC |
| | ACTCACACGT |
| 901 | GCGCAATTCG AGAAACTCGC AGCCTCTCTA ATCGAAAGAA |
| | CAAAATCTCC |
| 951 | ATGCATCAAA GCACTCAGTG ACGCAAAACT TTCCGCTAAG |
| | GATATCGATG |
| 1001 | ATGTTCTCTT AGTTGGAGGT ATGTCAAGAA TGCCCGCAGT |
| | GCAAGAAACT |
| 1051 | GTAAAAGAAC TCTTCGGCAA AGAGCCTAAT AAAGGAGTCA |
| | ACCCCGACGA |
| 1101 | AGTTGTTGCT ATTGGAGCCG CAATTCAAGG TGGTGTTCTT |
| | GGCGGAGAAG |
| 1151 | TTAAGGATGT TCTACTTCTA GACGTTATCC CCCTATCTCT |
| | GGGTATCGAA |
| 1201 | ACTCTAGGAG GCGTCATGAC GACTCTGGTA GAGAGAAATA |
| | CTACAATCCC |
| 1251 | TACACAGAAA AAACAAATCT TCTCCACAGC TGCTGATAAC |
| | CAGCCTGCGG |
| 1301 | TTACCATCGT AGTTCTCCAA GGAGAGCGTC CCATGGCCAA |
| | AGATAACAAG |
| 1351 | GAAATCGGAA GATTCGATCT TACAGATATC CCTCCGGCTC |
| | CTCGAGGCCA |
| 1401 | TCCTCAAATC GAAGTCTCCT TCGATATCGA TGCAAACGGA |
| | ATTTTCCATG |
| 1451 | TCTCAGCTAA AGATGTTGCC AGCGGTAAAG AACAGAAAAT |
| | TCGTATCGAA |
| 1501 | GCAAGCTCAG GACTTCAAGA AGATGAAATC CAAAGAATGG |
| | TTCGAGATGC |
| 1551 | CGAAATTAAT AAGGAAGAAG ATAAAAAACG TCGPGAAGCT |
| | TCAGATGCTA |
| 1601 | AAAATGAAGC CGATAGCATG ATCTTCAGAG CCGAAAAAGC |
| | TATTAAAGAT |
| 1651 | TATAAGGAGC AAATTCCTGA AACTTTAGTT AAAGAAATCG |
| | AAGAGCGAAT |
| 1701 | CGAAAACGTG CGCAACGCAC TCAAAGATGA CGCTCCTATT |
| | GAAAAAATTA |
| 1751 | AAGAGGTTAC TGAAGACCTA AGCAAGCATA TGCAAAAAAT |
| | TGGAGAGTCT |
| 1801 | ATGCAATCGC AGTCTGCATC AGCAGCAGCA TCATCGGCAG |
| | CCAATGCTAA |
| 1851 | AGGTGGACCT AACATCAATA CAGAAGATTT GAAAAAACAT |
| | AGTTTCAGTA |
| 1901 | CGAAGCCTCC TTCAAATAAC GGTTCTTCAG AAGACCATAT |
| | CGAAGAAGCT |
| 1951 | GATGTAGAAA TTATTGATAA CGACGATAAG TAA |

[0640] The PSORT algorithm predicts an inner membrane-location (0.151).

[0641] The protein was expressed in E. coli and purified as a GST-fusion product (FIG. 52A) and a his-tagged product. The proteins were used to immunise mice, whose sera were used in Western blot (FIG. 52B) and FACS (FIG. 52C) analyses.

[0642] The cp6790 protein was also identified in the 2D-PAGE experiment (Cpn0503).

[0643] These experiments show that cp6790 is a surface-exposed and immunoaccessible protein, and that it is a useful immunogen. These properties are not evident from the sequence alone.

### Example 53

[0644] The following C. pneumoniae protein (PID 4376878) was expressed <SEQ ID 105; cp6878>:

| | |
|---|---|
| 1 | MNVPDSKNLH PPAYELLEIK ARITQSYKEA SAILTAIPDG |
| | ILLLSETGHF |
| 51 | LICNSQAREI LGIDENLEIL NRSFTDVLPD TCLGFSIQEA |
| | LESLKVPKTL |
| 101 | RLSLCKESKE KEVELFIRKN EISGYLFIQI RDRSDYKQLE |
| | NAIERYKNIA |
| 151 | ELGKMTATLA HEIRNPLSGI VGFASILKKE ISSPRHORML |
| | SSIISGTRSL |
| 251 | LFRSIDPDRM NSVVWNLVKN AVETGNSPIT LTLHTSGDIS |
| | VTNPGTIPSE |
| 301 | IMDRLFTPFF TTKREGNGLC LAEAQKIIRL HGGDIQLKTS |
| | DSAVSFFIII |
| 351 | PELLAALFKE RAAS* |

[0645] The cp6878 nucleotide sequence <SEQ ID 106> is:

| | |
|---|---|
| 1 | ATGAACGTCC CTGATTCCAA GAACCTCCAT CCTCCTGCAT |
| | ACGAACTCCT |
| 51 | AGAGATCAAG GCTCGCATCA CACAATCTTA TAAAGAAGCC |
| | AGTGCTATAC |
| 101 | TGACAGCGAT TCCTGATGGT ATCCTATTAC TTTCTGAAAC |
| | AGGACACTTT |
| 151 | CTTATCTGCA ATTCACAAGC ACGTGAAATT CTAGGAATTG |
| | ATGAAAATCT |
| 201 | AGAAATTCTT AATAGATCCT TTACCGATGT TCTCCCCGAT |
| | ACGTGTCTTG |
| 251 | GATTTTCTAT TCAAGAGGCT CTTGAATCTC TAAAAGTCCC |
| | TAAAACTCTT |
| 301 | AGACTCTCTC TCTGTAAAGA ATCTAAAGAA AAAGAAGTGG |
| | AACTCTTCAT |
| 351 | CCGTAAAAAC GAOATCAGTG GATACCTGTT TATCCAAATC |
| | CGCGATCGGT |
| 401 | CCGACTATAA ACAACTAGAA AACGCTATAG AAAGATATAA |
| | AAATATCGCA |
| 451 | GAACTTGGGA AAATGACGGC TACCCTAGCT CACGAAATCC |
| | GCAATCCGCT |
| 501 | AAGTGGAATC GTTGGATTTG CCTCTATCCT AAAQAAAGAG |
| | ATTTCCCCTC |
| 551 | CTCGCCACCA ACGAATGCTC TCCTCAATCA TCTCCGGCAC |
| | AAGGTCTCTA |
| 601 | AATAACCTTG TCTCTTCTAT GTTAGAATAT ACAAAATCAC |
| | AACCGTTGAA |
| 651 | CCTAAAGATT ATAAATTTAC AAGACTTCTT CTCTTCTCTT |
| | ATCCCTCTGC |
| 701 | TCTCCGTCTC TTTCCCGAAT TGCAAGTTTG TAAGAGAGGG |
| | CGCACAACCT |
| 751 | CTATTCAGAT CTATAGATCC TGATCGGATG AACAGTGTCG |
| | TTTGGAACCT |
| 801 | AGTGAAAAAT GCTGTAGAAA CAGGGAACTC TCCGATCACT |
| | CTGACCCTGC |
| 851 | ATACATCGGG AGACATCTCG GTAACGAACC CCGGAACGAT |
| | TCCTTCCGAG |
| 901 | ATCATGGACA AGCTCTTCAC TCCATTCTTC ACAACAAAGA |
| | GAGAGGGAAA |
| 951 | TGGTTTGGGA CTTGCTGAAG CTCAAAAAAT TATAAGACTC |
| | CATGGAGGAG |
| 1001 | ATATCCAATT AAAAACAAGC GACTCCGCCG TTAGCTTCTT |
| | CATAATCATC |
| 1051 | CCCGAACTTC TAGCGGCCCT ACCCAAAGAA AGAGCCGCTA G |

[0646] The PSORT algorithm predicts an inner membrane location (0.204).

[0647] The protein was expressed in E. coli and purified as a his-tag product (FIG. 53A) and as a GST-fusion product. The recombinant GST-fusion protein was used to immunise mice, whose sera were used in a Western blot (FIG. 53B) and for FACS analysis.

[0648] These experiments show that cp6878 is a surface-exposed and immunoaccessible protein, and that it is a useful immunogen. These properties are not evident from the sequence alone.

### Example 54

[0649] The following C. pneumoniae protein (PID 4377224) was expressed <SEQ ID 107; cp7224>:

| | |
|---|---|
| 1 | MMKKIRKVAL AVGGSGGHIV PALSVKEAFS REGIDVLLLG |
| | KGLKNHPSLQ |
| 51 | QGISYREIPS GLPTVUIPIK IMSRTLSLCS GYLKARKELK |
| | IFDPDLVIGF |
| 101 | GSYUSLPVLL AGLSHKIPLP LHEQNLVPGK VNQLFSRYAR |
| | GIGVNFSPVT |
| 151 | KEFRCPAEEV FLPKRSFSLG SPMMKRCTNH TPTICVVGGS |
| | QGAQILNTCV |
| 201 | PQALVKLVNK YPNMYVHHIV GPKSDVMKVQ EVYNRGEVLC |
| | CVKPDEEQLL |
| 251 | DVLLAADLVI SRAGATILEE ILWAKVPGIL IPYPGAYGHQ |
| | EVNAKFFVDV |
| 301 | LEGGTNILEK ELTEKLLVEK VTFALDSHNR EKQRNSLAAY |
| | SQQRSTKTFH |

[0650] The cp7224 nucleotide sequence <SEQ ID 108> is:

| | |
|---|---|
| 1 | ATGATGAAGA AAATTCGAAA AGTAGCCTTG GCTGTAGGAG |
| | GTTCAGGAGG |
| 51 | CCACATTGTC CCAGCTCTCT CGGTAAAGGA AGCTTTTTCT |
| | CGTGAAGGAA |
| 101 | TAGACGTATT ACTACTAGGG AAAGGTCTCA AGAACCATCC |
| | TTCTTTGCAA |
| 151 | CAGGGAATCA GCTATCGGGA AATCCCCTCA GGACTTCCTA |
| | CAGTCCTTAA |
| 201 | TCCCATAAAG ATCATGAGCA GGACCCTTTC TCTATGTTCA |
| | GGATACCTGA |
| 251 | AAGCAAGAAA GGAACTTAAA ATTTTTGACC CTGACCTGGT |
| | CATAGGATTT |
| 301 | GGGAGCTACC ACTCTCTTCC CGTQTTGCTC GCAGGACTGT |
| | CCCATAAAAT |
| 351 | TCCCTTATTT CTACACGAAC AAAATCTAGT TCCTGGAAAA |
| | GTAAATCAAT |
| 401 | TGTTTTCCCG CTATGCTCGA GGTATTGGAG TGAATTTCTC |
| | CCCCGTTACT |
| 451 | AAACACTTCC GCTGCCCCGC AGAAGAGGTC TTCCTTCCTA |
| | AACGAAGCTT |
| 501 | CTCCTTAGGA AGCCCTATGA TGAAGCGATG TACAAATCAT |
| | ACCCCTACAA |
| 551 | TCTGTCTTGT TGGAGGTTCT CAGGGAGCAC AGATATTAAA |
| | TACTTGTGTT |
| 601 | CCCCAAGCTC TTGTCAAGCT AGTCAATAAG TACCCAAATA |
| | TGTACGTCCA |
| 651 | TCATATTGTA GGACCTAAAA GTGATGTTAT GAAGGTGCAA |
| | CATGTTTACA |
| 701 | ATCGTGGAGA GGTCCTCTGC TGTGTGAAGC CGTTCGAAGA |
| | GCAACTCCTA |
| 751 | GATGTCTTGC TTGCCGCAGA TTTGGTCATC AGTAGGGCAG |
| | GAGCCACAAT |
| 801 | TTTAGAAGAA ATTCTTTGGG CAAAAGTTCC CGGAATTTTA |
| | ATTCCCTATC |
| 851 | CAGGAGCTTA TGGACATCAG GAAGTTAATG CTAAATTCTT |
| | TGTAGACGTC |
| 901 | TTAGAAGGGG GAACTATGAT CCTAGAAAAA GAATTAACAG |
| | AGAAGCTATT |
| 951 | AGTAGAAAAA GTAACGTTTG CTTTAGACTC CCATAACAGA |
| | GAAAAACAAC |
| 1001 | GCAATTCCCT AGCGGCGTAT AGTCAGCAAA GGTCAACAAA |
| | AACATTCCAT |
| 1051 | GCATTCATTT GTGAATGCTT ATAG |

[0651] The PSORT algorithm predicts an inner membrane location (0.164).

[0652] The protein was expressed in E. coli and purified as a GST-fusion product, as shown in FIG. 54A. The recombinant protein was used to immunise mice, whose sera were used in a Western blot (FIG. 54B) and for FACS analysis (FIG. 54C). A his-tagged protein was also expressed.

[0653] This protein also showed good cross-reactivity with human sera, including sera from patients with pneumonitis.

[0654] These experiments show that cp7224 is a surface-exposed and immunoaccessible protein, and that it is a useful immunogen. These properties are not evident from the sequence alone.

### Example 55

[0655] The following C. pneumoniae protein (PID 4377140) was expressed <SEQ ID 109; cp7140>:

| | |
|---|---|
| 1 | MVRRSISFCL FFLMTLLCCT SCNSRSLIVH GLFGREANEI |
| | VVLLVSKGVA |
| 51 | AQKLPQAAAATAGAATEQMW DIAVPSAQIT EALAILNQAG |
| | LPRMKGTSLL |
| 101 | DLFAKQGLVP SELQEKIRYQ EGLSEQMAST IRKMDGVVDA |
| | SVQISFTTEN |
| 151 | EDNLPLTASV YIKHRGVLDN PNSIMVSKIK RLIASAVPGL |
| | VPENVSVVSD |
| 201 | HAAYSDITIN GPWGLTEEID YVSVWGIILA KSSLTXFRLI |
| | FYVLILILFV |
| 251 | ISCGLLWVIW KTHTLIMTMG GTKGFFNPTP YTKNALEAKK |
| | AEGAAADKEK |
| 301 | KEDADSQGES KNAETSKDKS SDKDAPEGSN EIEGA* |

[0656] A predicted signal peptide is highlighted.

[0657] The cp7140 nucleotide sequence <SEQ ID 110> is:

| | |
|---|---|
| 1 | ATGGTTCGTC GATCTATTTC TTTTTGCTTG TTCTTTCTAA |
| | TGACATTGCT |
| 51 | GTGCTGTACA AGCTGThACA GCAGGTCTCT AATTGTGCAC |
| | GGTCTTCCTG |
| 101 | GCAGAGAAGC GAATGAGATT GTGGTGCTTT TGGTAAGCAA |
| | AGGGGTGGCT |
| 151 | GCACAAAAAT TGCCTCAAGC TGCAGCGGCT ACAGCCGGAG |
| | CAGCTACTGA |
| 201 | GCAAATGTGG GATATCGCGG TTCCGTCAGC ACAAATCAAA |
| | GAGGCCCTTG |
| 251 | CCATTCTAAA TCAAGCGGGT CTTCCACGTA TGAAAGGGAC |
| | AAGCCTGTTA |
| 301 | GATCTTTTTG CAAAACAAGG TCTTGTTCCT TCCGAGCTTC |
| | AGGAAAAAAT |
| 351 | CCGTTATCAA GAAGGCTTAT CAGAACAGAT GGCCTCTACG |
| | ATTAGAAAAA |
| 401 | TGGATGGCGT TGTCGATGCC TCAQTACAGA TTTCCTTCAC |
| | TACAGAAAAT |
| 451 | GAAGATAATC TTCCTTTAAC AGCCTCTGTG TATATTAAGC |
| | ATCGAGGGGT |
| 501 | TTTGGGCAAT CCGAACAGCA TTATGGTTTC CAAAATTAAG |
| | CGCCTTATTG |
| 551 | CAAGTGCTGT TCCAGGACTT GTGCCAGAGA ACGTCTCTGT |
| | AGTGAGCGAT |
| 601 | CGCGCAGCTT ATAGTGATAT TACAATTAAT GGTCCTTGGG |
| | GATTAACAGA |
| 651 | AGAAATCGAT TATGTTTCTG TTTGGGGTAT TATTCTTGCG |
| | AAGTCTTCGC |
| 701 | TCACCAAATT CCGTCTCATT TTTTATGTCT TGATTCTCAT |
| | TTTATTTGTT |
| 751 | ATTTCTTGTG CTCTCCTTTG GGTCATTTGG AAAACTCATA |
| | CTCTCATTAT |
| 801 | GACTATGGGA GGTACAAAAG GGTTCTTCAA CCCTACACCA |
| | TATACAAAGA |
| 851 | ATGCCTTGGA AGCCAAGAAA GCCGAGGGAG CAGCTGCTGA |
| | CAAAGAGAAA |
| 901 | AAAGAAGATG CAGATTCACA GGGGGAAAGC AAAAATGCGG |
| | AAACCAGTGA |
| 951 | TAAAGACTCT AGTGATAAAG ATGCTCCAGA AGGAAGCAAT |
| | GAAATTGAGG |
| 1001 | GTGCTTAG |

[0658] The PSORT algorithm predicts an inner membrane location (0.650).

[0659] The protein was expressed in E. coli and purified as a GST-fusion product, as shown in FIG. 55A. The recombinant protein was used to immunise mice, whose sera were used in a Western blot (FIG. 55B) and for FACS analysis (FIG. 55C). A his-tagged protein was also expressed.

[0660] These experiments show that cp7140 is a surface-exposed and immunoaccessible protein, and that it is a useful immunogen. These properties are not evident from the sequence alone.

### Example 56

[0661] The following C. pneumoniae protein (PID 4377306) was expressed <SEQ ID 111; cp7306>:

| | |
|---|---|
| 1 | MITKQLRSWL AVLVGSSLLALPLSGQAVGK KESRVSELPQ |
| | DVLLKEISGG |
| 51 | FSKVATKATP AVVYTESFPK SQAVTHPSPG RRGPYENPFD |
| | YFNDEPFNRP |
| 101 | FGLPSQREKP QSKFAVRGTG FLVSPDGYIV TNNHVVEDTG |
| | KIHVTLHDGQ |
| 151 | KYPATVIQLD PKTDLAVIKI KSQNLPYLSF GNSDHLKVGD |
| | WAIAIGNPFG |
| 201 | LQATVTVGVI SARGRNQLRI ADFEDFXQPD AAINPGNSGG |
| | PLLNIDGQVI |
| 251 | GVNTAIVSGS GGYIGIGFAI PSLMANRTID QLIRDGQVTR |
| | GFLGVTLQPI |
| 301 | DAELAACYKL EKVYGALVTD VVKGSPADRA GLKQEDVIIA |
| | YNGKEVDSLS |
| 351 | MFRNAVSLMN PDTRIVLKVV REGKVIEIPV TVSQAPKEDG |
| | MSALQRVGIR |
| 401 | VQNLTPETAK RLGIAPETXG ILIISVSPGS VAASSGIAPG |
| | QLILAVNRQK |
| 451 | VSSIEDLNRT LKDSNNENIL LMVSQGPVIR FIALKPEE* |

[0662] A predicted signal peptide is highlighted.

[0663] The cp7306 nucleotide sequence <SEQ ID 112> is:

| | |
|---|---|
| 1 | ATGATAACTA AGCAATTGCG TTCGTGGCTA GCTGTACTTG |
| | TTGGTTCAAG |
| 51 | TCTGCTAGCT CTTCCTTTAT CAGGGCAAQC TGTCGGGAAA |
| | AAAGAATCTC |
| 101 | GAGTTTCCGA GCTGCCTCAA GACGTTCTTC TTAAAGAGAT |
| | CTCGGGAGGG |
| 151 | TTTTCTAAGG TCGCTACCAA GGCGACTCCC GCTGTTGTGT |
| | ACATAGAAAG |
| 201 | TTTCCCAAAG AGCCAGGCTG TAACACATCC TTCTCCPGGA |
| | CGCCGTGGGC |
| 251 | CTTATGAAAA TCCTTTTGAT TATTTTAATG ATGAGTTTTT |
| | CAATCGTTTT |
| 301 | TTTGGTCTAC CTTCACAGAG GGAAAAACCT CAAAGTAAAG |
| | AGGCGGTTCG |
| 351 | AGGAAGAGGT TTCCTAGTAT CTCCAGATGG CTATATTGTG |
| | ACTAATAACC |
| 401 | ATGTTGTCGA AGATACAGGT AAGATTCACG TAACTCTTCA |
| | TGATGGGCAA |
| 451 | AAGTACCCAG CAACTGTAAT CGGACTCGAT CCTAAAACAG |
| | ACCTTGCAGT |
| 501 | CATTAAAATT AAATCCCAAA ACCTCCCGTA TCTTTCTTTT |
| | GGAAACTCCG |
| 551 | ACCACTTAAA AGTCGGAGAT TGGGCAATTG CAATTGGAAA |
| | TCCCTTCGGT |
| 601 | CTTCAAGCTA CGGTCACCGT AGGTGTCATC AGTGCTAAAG |
| | GAAGAAATCA |
| 651 | ACTCCACATT GCAGATTTTG AAGATTTTAT TCAGACAGAT |
| | GCTGCGATTA |
| 701 | ATCCAGGCAA CTCTGGAGGC CCTCTTCTAA ATATTGATGG |
| | ACAGGTCATC |
| 751 | GGTGTTAATA CTGCCATTGT CAGTGGTAGT GGTGGCTATA |
| | TTGGAATCGG |
| 801 | GTTTGCGATT CCTAGCCTTA TGGCAAATAG AATCATAGAT |
| | CAGCTGATTC |
| 851 | GTGATGGTCA AGTTACCCGA GGATTCTTAG GAGTGACTTT |
| | ACAACCTATA |
| 901 | GATGCGGAAC TCGCTGCTTG CTACAAACTC GAAAAGGTTT |
| | ATGGCGCTTT |
| 951 | AGTCACAGAT GTTGTTAAAG GATCTCCAGC AGATAAAGCA |
| | GGGCTAAAAC |
| 1001 | AAGAAGATGT GATCATTCCT TATAATGGGA AAGAAGTCGA |
| | TTCACTGAGT |
| 1051 | ATGTTCCGTA ATGCTGTTTC TTTAATGAAT CCAGATACAC |
| | GTATTGTTCT |
| 1101 | AAAGGTAGTT CGTGAAGGGA ACGTTATCGA AATACCCGTG |
| | ACAGTTTCTC |
| 1151 | AAGCTCCAAA AGAAGATGGA ATGTCGGCTT TACAGCGTGT |
| | GGGAATCCGT |
| 1201 | GTGCAAAACC TAACTCCTGA AACTGCTAAG AAGCTGGGAA |
| | TTGCTCCAGA |
| 1251 | GACTAAAGGC ATTTTGATTA TAAGTGTTGA ACCAGGQTCT |
| | GTAGCAGCTT |
| 1301 | CTTCAGGAAT TGCTCCTGGT CAGCTGATCC TTGCTGTGAA |
| | TAGACAAAAA |
| 1351 | GTATCTTCGA TTGAAGATCT GAATAGAACG TTAAAAGATT |
| | CTAACAATGA |
| 1401 | GAATATTCTT CTTATGGTTT CTCAAGGAGA TGTTATTCGC |
| | TTCATTGCCC |
| 1451 | TGAAACCTGA AGAATAA |

[0664] The PSORT algorithm predicts a periplasmic location (0.923).

[0665] The protein was expressed in E. coli and purified as a his-tag product (FIG. 56A) and as a GST-fusion product FIG. 56B). The recombinant proteins were used to immunise mice, whose sera were used in a Western blot (FIG. 56C) and for FACS (FIG. 56D) analyses.

[0666] The cp7306 protein was also identified in the 2D-PAGE experiment (Cpn0979) and showed good cross-reactivity with human sera, including sera from patients with pneumonitis.

[0667] These experiments show that cp7306 is a surface-exposed and immunoaccessible protein, and that it is a useful immunogen. These properties are not evident from the sequence alone.

### Example 57

[0668] The following C. pneumoniae protein (PID 4377132) was expressed <SEQ ID 113; cp7132>:

| | |
|---|---|
| 1 | MCNSIAMKKQ KRGFVLMELL MSFTLIALLL GTLGFWYRKI |
| | YTVQKQKERI |
| 51 | YNFYXEESRA YKQLRTLFSN SLSSSYEEPG SLFSLIFDRG |
| | VYRDPKLAGA |
| 101 | VRASLHHDTK DQRLELRICN IKDQSYFETQ RLLSHVTHVV |
| | LSFQRNPDPE |
| 151 | KLPETIALTI TREPKAYPPR TLTYQFAVGI* |

[0669] A predicted signal peptide is highlighted.

[0670] The cp7132 nucleotide sequence <SEQ ID 114> is:

| | |
|---|---|
| 1 | ATGTGTAACT CTATAGCTAT GAAAAAGCAA AAGCGTGGCT |
| | TTGTGCTTAT |
| 51 | GGAATTACTC ATGTCGTTCA CTCTAATTGC TTTGTTATTA |
| | GGGACTTTAG |
| 101 | GATTTTGGTA TCGGAAAATT TATACTGTAC AAAAGCAAAA |
| | AGAACGTATT |
| 151 | TATAACTTTT ATATCGAAGA GAGCCGAGCC TACAAGCAGC |
| | TCAGAACCCT |
| 201 | GTTTAGCATG TCCTTGTCTT GATCTTACGA GGAGCCTGGA |
| | TCATTATTTT |
| 251 | CTTTAATCTT TGATCGGGGG GTTTATCGAG ATCCTAAGCT |
| | GGCAGGTGCG |
| 301 | GTACGAGCTT CTCTCCATCA TGACACCAAG GATCAGAGAT |
| | TGGAACTTCG |
| 351 | TATTTGTAAT ATTAAGGATC AGTCTTACTT TGAAACACAG |
| | CGACTGCTCT |
| 401 | CCCACGTGAC CCATGTTGTA CTTTCCTTCC AGAGAAATCC |
| | TGATCCTGAA |
| 451 | AAACTTCCTG AAACAATTGC TTTAACTATA ACACGGGAAC |
| | CTAAAGCATA |
| 501 | TCCTCCAAGG ACGTTAACAT ACCAATTTGC GGTTGGGAAA |
| | TAA |

[0671] The PSORT algorithm predicts a periplasmic location (0.915).

[0672] The protein was expressed in E. coli and purified as a his-tag product (FIG. 57A) or as a GST-fusion. The recombinant proteins were used to immunise mice, whose sera were used in a Western blot (FIG. 57B) and FACS (FIG. 57C) analyses.

[0673] These experiments show that cp7132 is a surface-exposed and immunoaccessible protein, and that it is a useful immunogen. These properties are not evident from the sequence alone.

### Example 58

[0674] The following C. pneumoniae protein (PID 4376733) was expressed <SEQ ID 115; cp6733>:

| | |
|---|---|
| 1 | MKTSIPWVLV SSVLAFSCHL QSLANEELLS PDDSFNGNID |
| | SGTFTPKTSA |
| 51 | TTYSLTGDVF FYEPGKGTPL SDSCFKQTTD NLTFLGNGHS |
| | LTFGFIDAGT |
| 101 | HAGAAASTTA NKNLTFSGFS LLSFDSSPST TVVTGQGTLS |
| | SAGGVNLENI |
| 151 | RKLVVAGNPS TADGGAIKGA SFLLTGTSGD ALFSNNSSST |
| | KGGAIATTAG |
| 201 | ARIANNTGYV RFLSNIASTS GGAIDDEGTS ILSNNKFLYF |
| | EGNAAKTTGG |
| 251 | AICNTKASGS PELIISNNKT LIFASNVAET SGGAIHAXKL |
| | ALSSGGFTEF |
| 301 | LRNNVSSATP KGGAISIDAS GELSLSAETQ NITFVRNTLT |
| | TTGSTDTPKR |
| 351 | NAINIGSNGK FTELRAAKNH TIFFYDPITS EGTSSDVLKI |
| | NNGSAGALNP |
| 401 | YQGTILFSGE TLTADELKVA DNLKSSETQP VSLSGGKLLL |
| | QKGVTLESTS |
| 451 | FSQEAGSLIG MDSGTTLSTT AGSITITNLG INVDSLGLKQ |
| | PVSLTAKGAS |
| 501 | NKVIVSGKLN LIDIEGNIYE SHMFSHDQLF SLLKITVDAD |
| | VDTNVDISSL |
| 551 | IPVPAEDPNS EYGFQGQWNV NWTTDTATNT KEATATWTKT |
| | GFVPSPERKS |
| 601 | ALVCNTLWGV FTDIRSLQQL VEIGATGMEH KQGFWVSSMT |
| | NPLEKTGDEN |
| 651 | RKGFRHTSGG YVIGGSAHTP KDDLFTFAFC HLFARDKDCF |
| | IAHNNSRTYG |
| 701 | GTLFFKHSHT LQPQNYLRLG RAKFSESAIE KFPREIPLAL |
| | DVQVSFSHSD |
| 751 | NRMETHYTSL PESEGSWSNE CIAGGIGLDL PFVLSNPHPL |
| | FKTFIPQMKV |
| 801 | EMVYVSQNSF FESSSDGRGF SIGRLLNLSI PVGAKFVQGD |
| | IGDSYTYDLS |
| 851 | GPFVSDVYRN NPQSTATLVM SPDSWKIRGG NLSRQAPLLR |
| | CSNNYVYNSN |
| 901 | CELFGHYAME LRGSSRYNNV DVGTKLRF* |

[0675] A predicted signal peptide is highlighted.

[0676] The cp6733 nucleotide sequence <SEQ ID 116> is:

| | |
|---|---|
| 1 | ATGAAGACTT CGATTCCTTG GCTTTTAGTT TCCTCCGTGT |
| | TAGCTTTCTC |
| 51 | ATGTCACCTA CAGTCACTAG CTAACGAGGA ACTTTTATCA |
| | CCTGATGATA |
| 101 | GCTTTAATGG AAATATCGAT TCAGGAACGT TTACTCCAAA |
| | AACTTCAGCC |
| 151 | ACAACATATT CTCTAACAGG AGATGTCTTC TTTTACGAGC |
| | CTGGAAAAGG |
| 201 | CACTCCCTTA TCTGACAGTT GTTTTAAGCA AACCACGGAC |
| | AATCTTACCT |
| 251 | TCTTGGGGAA CGGTCATAGC TTAACGTTTG GCTTTATAGA |
| | TGCTGGCACT |
| 301 | CATGCAGGTG CTGCTGCATC TACAACAGCA AATAAGAATC |
| | TTACCTTCTC |
| 351 | AGGGTTTTCC TTACTGAGTT TTGATTCCTC TCCTAGCACA |
| | ACGGTTACTA |
| 401 | CAGGTCAGGG AACGCTTTCC TCAGCAGGAG GCGTAAATTT |
| | AGAAAATATT |
| 451 | CGTAAACTTG TAGTTGCTGG GAATTTTTCT ACTGCAGATG |
| | GTGGAGCTAT |
| 501 | CAAAGGAGCG TCTTTCCTTT TAACTGGCAC TTCTGGAGAT |
| | GCTCTTTTTA |
| 551 | GTAACAACTC TTCATCAACA AAGGGAGGAG CAATTGCTAC |
| | TACAGCAGGC |
| 601 | GCTCGCATAG CAAATAACAC AGGTTATGTT AGATTCCGTT |
| | CTAACATAGC |
| 651 | GTCTACGTCA GGAGGCGCTA TCGATGATGA AGGCACGTCG |
| | ATACTATCGA |
| 701 | ACAACAAATT TCTATATTTT GAAGGGAATG CAGCGAAAAC |
| | TACTGGCGGT |
| 751 | GCGATCTGCA ACACCAAGGC GAGTGGATCT CCTGAACTGA |
| | TAATCTCTAA |
| 801 | CAATAAGACT CTGATCTTTG CTTCAAACGT AGCAGAAACA |
| | AGCGGTGGCG |
| 851 | CCATCCATGC TAAAAAGCTA GCCCTTTCCT CTGQAGGCTT |
| | TACAGAGTTT |
| 901 | CTACGAAATA ATGTCTCATC AGCAACTCCT AAGGGGGGTG |
| | CTATCAGCAT |
| 951 | CGATGCCTCA GGAGAGCTCA GTCTTTCTGC AGAGACAGGA |
| | AACATTACCT |
| 1001 | TTGTAAGAAA TACCCTTACA ACAACCGGAA GTACCGATAC |
| | TCCTAAACGT |
| 1051 | AATGCGATCA ACATAGGAAG TAACGGGAAA TTCACGGAAT |
| | TACGGGCTGC |
| 1101 | TAAAAATCAT ACAATTTTCT TCTATGATCC CATCACTTCA |
| | GAAGGAACCT |
| 1151 | CATCAGACGT ATTGAAGATA AATAACGGCT CTGCGGGAGC |
| | TCTCAATCCA |
| 1201 | TATCAAGGAA CGATTCTATT TTCTGGAGAA ACCCTAACAG |
| | CAGATGAACT |
| 1251 | TAAAGTTGCT GACAATTTAA AATCTTCATT CACGCAGCCA |
| | GTCTCCCTAT |
| 1301 | CCGGAGGAAA GTTATTGCTA CAAAAGGGAG TCACTTTAOA |
| | GAGCACGAGC |
| 1351 | TTCTCTCAAG AGGCCGGTTC TCTCCTCGGC ATGGATTCAG |
| | GAACGACATT |
| 1401 | ATCAACTACA GCTGGGAGTA TTACAATCAC GAACCTAGGA |
| | ATCAATGTTG |
| 1451 | ACTCCTTAGG TCTTAAGCAG CCCGTCAGCC TAACAGCAAA |
| | AGGTGCTTCA |
| 1501 | AATAAAGTGA TCGTATCTGG GAAGCTCAAC CTGATTGATA |
| | ATGAAGGCAA |
| 1551 | CATTTATGAA AGTCATATGT TCAGCCATGA CCAGCTCTTC |
| | TCTCTATTAA |
| 1601 | AAATCACGGT TGATGCTGAT GTTGATACTA ACGTTGACAT |
| | CAGCAGCCTT |
| 1651 | ATCCCTGTTC CTGCTGAGGA TCCTAATTCA GAATACGGAT |
| | TCCAAGGACA |
| 1701 | ATGGAATGTT AATTGGACTA CGGATACAGC TACAAATACA |
| | AAAGAGGCCA |
| 1751 | CGGCAACTTG GACCAAAACA GGATTTGTTC CCAGCCCCGA |
| | AAGAAAATCT |
| 1801 | GCGTTAGTAT GCAATACCCT ATGGGGAGTC TTTACTGACA |
| | TTCGCTCTCT |
| 1851 | GCAACAGCTT GTAGAGATCG GCGCAACTGG TATGGAACAC |
| | AAACAAGGTT |
| 1901 | TCTGGGTTTC CTCCATGACG AACTTCCTGC ATAAGACTGG |
| | AGATGAAAAT |
| 1951 | CGCAAAGGCT TCCGTCATAC CTCTGGAGGC TACGTCATCG |
| | GTGGAAGTGC |
| 2001 | TCACACTCCT AAAGACGACC TATTTACCTT TGCGTTCTGC |
| | CATCTCTTTG |
| 2051 | CTAGAGACAA AGATTGTTTT ATCGCTCACA ACAACTCTAG |
| | AACCTACGGT |
| 2101 | GGAACTTTAT TCTTCATGCA CTCTCATACC CTACAACCCC |
| | AAAACTATTT |
| 2151 | GAGATTAGGA AGAGCAAAGT TTTCTGAATC AGCTATAGAA |
| | AAATTCCCTA |
| 2201 | GGGAAATTCC CCTAGCCTTG GATGTCCAAG TTTCGTTCAG |
| | CCATTCAGAC |
| 2251 | AACCGTATGG AAACGCACTA TACCTCATTG CCAGAATCCG |
| | AAGGTTCTTG |
| 2301 | GAGCAACGAG TGTATAGCTG GTGGTATCGG CCTAGACCTT |
| | CCTTTTGTTC |
| 2351 | TTTCCAACCC ACATCCTCTT TTCAAGACCT TCATTCCACA |
| | GATGAAAGTC |
| 2401 | GAAATGGTTT ATGTATCACA AAATAGCTTC TTCGAAAGCT |
| | CTAGTGATGG |
| 2451 | CCGTGGTTTT AGTATTGGAA GGCTGCTTAA CCTCTCGATT |
| | CCTGTGGGTG |
| 2501 | CGAAATTCGT GCAGGGGGAT ATCGGAGATT CCTACACCTA |
| | TGATCTCTCA |
| 2551 | GGATTCTTTG TTTCCGATGT CTATCGTAAC AATCCCCAAT |
| | CTACAGCGAC |
| 2601 | TCTTGTGATG AGCCCAGACT CTTGGAAAAT TCGCGGTGGC |
| | AATCTTTCAA |
| 2651 | GACAGGCATT TTTACTGAGG GGTAGCAACA ACTACGTCTA |
| | CAACTCCAAT |
| 2701 | TGTGAGCTCT TCGGACATTA CGCTATGGAA CTCCGTGGAT |
| | CTTCAAGGAA |
| 2751 | CTACAATGTA GATGTTGGTA CCAAACTCCG ATTCTAG |

[0677] The PSORT algorithm predicts an outer membrane location (0.924).

[0678] The protein was expressed in E. coli and purified as a his-tag product, as shown in FIG. 58A. The recombinant protein was used to immunise mice, whose sera were used in a Western blot (FIG. 58B) and for FACS (FIG. 58C) analyses. A GST-fusion protein was also expressed.

[0679] The cp6733 protein was also identified in the 2D-PAGE experiment (Cpn0451).

[0680] These experiments show that cp6733 is a surface-exposed and immunoaccessible protein, and that it is a useful immunogen. These properties are not evident from the sequence alone.

### Example 59

[0681] The following C. pneumoniae protein (PID 4376814) was expressed <SEQ ID 117; cp6814>:

| | |
|---|---|
| 1 | MHDALLSILA IQELDIKMIR LMRVKKEHQK ELAKVQSLKS |
| | DIRRVQEKE |
| 51 | LEMENLKTQI RDGENRIQRI SEQINKLENQ QAAVKKMDEF |
| | NALTQEMTTA |
| 101 | NKERRSLEHQ LSDLMDKQAG GEDLIVSLKE SLASTENSSS |
| | VIEKEIFESI |
| 151 | KKINEEGKAL LEQRTELKHA TNPELLSIYE RLLNNKKDRV |
| | VVPIENRVCS |
| 201 | GCHIVLTPQH ENLVRKKDRL IECEECSRIL YWQESQVNAQ |
| | ENSTAXEERR |
| 251 | RAAV* |

[0682] The cp6814 nucleotide sequence <SEQ ID 118> is:

| | |
|---|---|
| 1 | ATGCATGACG CACTTCTAAG CATTTTGGCT ATTCAAGAGC |
| | TTGATATTAA |
| 51 | AATGATTCGC CTTATGCGCG TAAAGAAAGA ACATCAGAAA |
| | GAATTGGCTA |
| 101 | AAGTCCAATC TTTAAAAAGT GATATTCGTA GAAAAGTTCA |
| | GGAAAAAGAA |
| 151 | CTCGAAATGG AGAATTTGAA AACTCAAATT CGAGATGGAG |
| | AGAATCGCAT |
| 201 | CCAAGAGATT TCTGAACAAA TCAATAAATT AGAAAATCAG |
| | CAAGCTGCTG |
| 251 | TAAAAAAAAT GGATGAGTTT AACGCTCTCA CCCAAGAAAT |
| | GACTACAGCA |
| 301 | AACAAAGAAC GTCGCTCTTT AGAGCACCAG CTTAGCGATC |
| | TCATGGATAA |
| 351 | GCAAGCTTGA GGCGAAGACC TTATTGTCTC TCTAAAAGAA |
| | AGCTTAGCTT |
| 401 | CTACAGAAAA TAGTAGCAGT GTCATTGAAA AAGAAATTTT |
| | TGAAAGCATC |
| 451 | AAAAAGATTA ATGAAGAAGG CAAAGCTTTG CTTGAACAAC |
| | GGACAGAGTT |
| 501 | AAAGCATGCG ACGAATCCCG AACTACTCAG CATCTATGAG |
| | CGTCTATTAA |
| 551 | ACAATAAAAA AGATCGCGTT GTTGTTCCTA TTGAAAATCG |
| | TGTCTGCAGT |
| 601 | GGTTGTCATA TTGTTCTAAC TCCTCAACAC GAAAATCTTG |
| | TAAGAAAGAA |
| 651 | AGACCGACTC ATTTTTTGCG AACATTGCTC TCGAATTCTC |
| | TATTGGCAAG |
| 701 | AATCCCAAGT CAATGCTCAG GAAAATTCCA CAGCAAAACG |
| | TCGTCGTCGT |
| 751 | CGCGCAGCTG TATAA |

[0683] The PSORT algorithm predicts an inner membrane location (0.070).

[0684] The protein was expressed in E. coli and purified as a GST-fusion (FIG. 59A) or his-tagged product. The recombinant proteins were used to immunise rice, whose sera were used in Western blot (FIG. 59B) and FACS (FIG. 59C) analyses.

[0685] These experiments show that cp6814 is a surface-exposed and immunoaccessible protein, and that it is a useful immunogen. These properties are not evident from the sequence alone.

### Example 60

[0686] The following C. pneumoniae protein (PID 4376830) was expressed <SEQ ID 119; cp6830>:

| | |
|---|---|
| 1 | MKWLPATAVF AAVLPALTAF G DPASVEIST SHTGSGDPTS |
| | DAALTGFTQS |
| 51 | STETDGTTYT IVGDITPSTF TNIPVPVVTP DANDSSSNSS |
| | KGGSSSSGAT |
| 101 | SLIRSSNLHS DFDFTKDSVL DLYHLFFPSA SNTLNPALLS |
| | SSSSGGSSSS |
| 151 | SSSSSSGSAS AVVAADPKGG AAFYSNEANG TLTFTTDSGN |
| | PGSLTLQNLK |
| 201 | MTGDGAAIYS KGPLVFTGLK NLTFTGNESQ KSGGAAYTEG |
| | ALTTQAIVEA |
| 251 | VTFTGNTSAG QGGAIYVKEA TLFNALDSLK FEKNTSGQAG |
| | GGIYTESTLT |
| 301 | ISNITKSIEF ISNXASVPAP APBPTSPAPS SLINSTTIDT |
| | STLQTRAASA |
| 351 | TPAVAPVAAV TPTPISTQET AGNGGAIYAK QGTSISTSKD |
| | LTFKSNSASV |
| 401 | DATLTVDBST IGESGGAIFA ADSIQIQQCT GTTLFSGMTA |
| | NXSGGGIYAV |
| 451 | GQVTLEDIAN LKMTNNTCKG EGGAIYTKKA LTINNGAILT |
| | TFSGNTSTDN |
| 501 | GGAIFAVGGI TLSDLVEVRF SKNKTGNYSA PITKAASNTA |
| | PVVSSSTTAA |
| 551 | SPAVPAAAAA PVTNAAKGGA LYSTEGLTVS GITSILSFEN |
| | NECQNQGGGA |
| 601 | YVTKTFQCSD SHRLQFTSNK AADEGGGLYC GDDVTLTNLT |
| | GKTLFQEWSS |
| 651 | EKHGGGLSLA SGKSLTMTSL E8FCLNANTA KENGGGANVP |
| | ENIVLTFTYT |
| 701 | PTPNEPAPVQ QPVYGEALVT GNTATKSGGG IYTKNAAFSN |
| | LSSVTFDQNT |
| 751 | SSENGGALLT QKAADKTDCS FTYITNVNIT NNTATGNGGG |
| | IAGGKAHFDR |
| 801 | IDNLTVQSNQ AKKGGGVYLE DALILEKVIT GSVSQNTATE |
| | SGGGIYAKDI |
| 851 | QLQALPGSFT ITDNKVBTSL TTSTNLYGGG IYSSGAVTLT |
| | NISGTFGITG |
| 901 | NSVINTATSQ DADIQGGGIY ATTSLSINQC NTPILFSNNS |
| | AATKKTSTTK |
| 951 | QIAGGAIESA AVTIENNSQP IIFLNNSAKS EATTAATAGN |
| | KDSCGGAIAA |
| 1001 | NSVTLTNNPE ITFKGNYAET GGAIGCIDLT NGSPPRKVSI |
| | ADNGSVLFQD |
| 1051 | NSALNRGGAI YGETIDISRT GATFIGNSSR HDGSAICCST |
| | ALTLAPNSQL |
| 1101 | IFENNKVTET TATTKABINN LGAAIYGNNE TSDVTISLSA |
| | ENGSIFFKNN |
| 1151 | LCTATNKYCS IAGNVKFTAI EASAGRAISE YDAVNVSTKE |
| | TNAQELKLNE |
| 1201 | KATSTGTILF SGELHENKSY IPQKVTFAHG NLILGKNAEL |
| | SVVSFTQSPG |
| 1251 | TTITMGPGSV LSNHSKEAGG IAINNVIIDF SEIVPTKDNA |
| | TVAPPTLKLV |
| 1301 | SRTNADSKDK IDITGTVTLL DPNGNLYQNS YLGEDRDITL |
| | FNIDNSASGA |
| 1351 | VTATNVTLQG NLGAKKGYLG TWNLDPNSSG SKIILKWTFI |
| | KYLRWPYIPR |
| 1401 | DNHFYINSIW GAQNSLVTVK QGILGNMLNN ASPEDPAFNN |
| | FWASAIGSFL |
| 1451 | RKEVSRNSDS FTYHGRGYTA AVDAKPRQEF ILGAAFSQVF |
| | GHAESEYHLD |
| 1501 | NYKHKGSGHS TQASLYAGNI FYFPAIRSRP ILPQGVATYG |
| | YNQHDTTTYY |
| 1551 | PSIEEKNMAN WDSIAWLFDL RFSVDLKEPQ PHSTARLTFY |
| | TEAEYTRIRQ |
| 1601 | EKFTELDYDP RSPSACSYGN LAIPTGFSVD GALAWREIIL |
| | YNKVSAAYLP |
| 1651 | VILRNNPKAT YEVLSTKEKG NVVNVLPTRN AARAEVSSQI |
| | YLGSYWTLYG |
| 1701 | TYTIDASMNT LVQMANGGIR FVF* |

[0687] A predicted signal peptide is highlighted.

[0688] The cp6830 nucleotide sequence <SEQ ID 120> is:

| | |
|---|---|
| 1 | ATGAAGTGGC TACCAGCTAC AGCTGTTTTT GCTGCCGTAC |
| | TCCCCGCACT |
| 51 | AACAGCCTTC GGAGATCCCG CGTCTGTTGA AATAAGTACC |
| | AGCCATACAG |
| 101 | GATCCGGGGA TCCTACAAGC GACGCTGCCT TAACAGGATT |
| | TACACAAAGT |
| 151 | TCCACAGAAA CTGACGGTAC TACCTATACC ATTGTCGGTG |
| | ATATCACCTT |
| 201 | CTCTACTTTT ACGAATATTC CTGTTCCCGT AGTAACTCCA |
| | GACGCCAACG |
| 251 | ATAGTTCCAG CAATAGCTCT AAAGGAGGAA GTAGCAGTAG |
| | TGGAGCTACA |
| 301 | TCTCTAATCC GATCCTCAAA CCTACACTCC GATTTTGATT |
| | TTACAAAAGA |
| 351 | TAGCGTGTTA GACCTCTATC ACCTTTTCTT TCCTTCAGCT |
| | TCAAATACTC |
| 401 | TCAATCCTGC ACTCCTTTCT TCCAGTAGCA GCGGTGGATC |
| | CTCGAGCAGC |
| 451 | AGTAGCTCCT CATCATCTGG AAGTGCATCT GCTGTTGTTG |
| | CTGCGGACCC |
| 501 | AAAAGGAGGC GCTGCCTTTT ATAGTAACGA GGCTAACGGA |
| | ACTTTAACCT |
| 551 | TCACTACAGA CTCTGGAAAT CCCGGCTCCC TGACTCTTCA |
| | GAATCTTAAA |
| 601 | ATGACCGGAG ATGGAGCCGC CATCTACTCG AAGGGTCCTC |
| | TAGTATTTAC |
| 651 | TGGTTTAAAA AATCTAACCT TTACAGGAAA TGAATCTCAG |
| | AAATCTGGAG |
| 701 | GTGCTGCCTA TACTGAAGGC GCACTCACAA CACAAGCAAT |
| | CGTTGAAGCC |
| 751 | GTAACTTTTA CTGGCAACAC CTCGGCAGGG CAAGGAGGCG |
| | CTATCTATGT |
| 801 | TAAAGAAGCT ACCCTATTCA ATGCTCTAGA CAGCCTCAAA |
| | TTTGAAAAAA |
| 851 | ACACTTCTGG GCAAGCTGGT GGTGGAATCT ATACAGAGTC |
| | TACGCTCACA |
| 901 | ATCTCGAACA TCACAAAATC TATTGAATTT ATCTCTAATA |
| | AAGCTTCTGT |
| 951 | CCCTGCCCCC GCTCCTGAGC CCACCTCTCC GGCTCCAAGT |
| | AGCTTAATAA |
| 1001 | ATTCTACAAC GATCGATACC TCGACTCTCC AAACCCGAGC |
| | AGCATCCGCA |
| 1051 | ACTCCAGCAG TGGCTCCTGT TGCTGCCGTA ACTCCAACAC |
| | CAATCTCTAC |
| 1101 | TCAAGAGACC GCAGGAAATG GAGGCGCTAT CTATGCTAAA |
| | CAAGGTATTT |
| 1151 | CGATATCCAC GTTTAAAGAT CTGACCTTCA AGTCTAACTC |
| | TGCATCGGTA |
| 1201 | GATGCCACCC TTACTGTCGA TTCTAGCACT ATTGGAGAAT |
| | CTGGAGGTGC |
| 1251 | TATCTTTGCA GCAGACTCTA TACAAATCCA ACAGTGCACG |
| | GGAACCACCT |
| 1301 | TATTCAGTGG CAATACTGCC AATAAGTCTG GTGGGGGTAT |
| | TTACGCTGTA |
| 1351 | GGACAAGTCA CCCTAGAAGA TATAGCGAAT CTGAAGATGA |
| | CCAACAACAC |
| 1401 | CTGTAAAGGT GAAGGTGGAG CCATCTACAC TAAAAAGGCT |
| | TTAACTATCA |
| 1451 | ACAACGGTGC CATTCTCACT ACATTTTCTG GAAATACATC |
| | GACAGATAAT |
| 1501 | GGTGGGGCTA TTTTTGCTGT AGGTGGCATC ACTCTCTCTG |
| | ATCTTGTAGA |
| 1551 | AGTCCGCTTT AGTAAAAATA AGACCGGAAA TTATTCCGCT |
| | CCTATTACCA |
| 1601 | AAGCGGCTAG CAACACAGCT CCTGTAGTTT CTAGCTCTAC |
| | AACTGCTGCA |
| 1651 | TCTCCTGCGG TCCCTGCTGC CGCTGCAGCA CCTGTTACAA |
| | ACGCAGCAAA |
| 1701 | AGGAGGGGCT TTATATAGTA CAGAAGGACT GACTGTATCT |
| | GGAATCACAT |
| 1751 | CGATATTGTC GTTTGAAAAC AACGAATGCC AGAATCAAGG |
| | AGGTGGGGCT |
| 1801 | TACGTTACTA AAACCTTCCA GTGTTCCGAT TCTCATCGCC |
| | TCCAGTTTAC |
| 1851 | TAGTAATAAA GCAGCAGATG AAGGCGGGGG CCTGTATTGT |
| | GGTGACGATG |
| 1901 | TCACGCTAAC GAACCTGACA GGGAAAACAC TATTTCAAGA |
| | GAATAGCAGT |
| 1951 | GAGAAACATG GAGGTGGGCT CTCTCTCGCC TCAGGAAAAT |
| | CTCTGACTAT |
| 2001 | GACATCGTTA GAGAGCTTCT GCTTAAATGC AAATACAGCA |
| | AAGGAAAACG |
| 2051 | GAGGCGGTGC GAATGTCCCT GAAAATATTG TACTCACCTT |
| | CACCTATACT |
| 2101 | CCCACTCCAA ATGAACCTGC GCCTGTGCAG CAGCCCGTGT |
| | ATGGAGAAGC |
| 2151 | TCTTGTTACT GGAAATACAG CCACAAAAAG TGGTGGGGGC |
| | ATTTACACGA |
| 2201 | AAAATGCGGC CTTCTCAAAT TTATCTTCTG TAACTTTTGA |
| | TCAAAATACC |
| 2251 | TCTTCAGAAA ATGGTGGTGC CTTACTTACC CAAAAAGCTC |
| | CAGATAAAAC |
| 2301 | GGACTGTTCT TTCACCTATA TTACAAATGT CAATATCACC |
| | AACAATACAG |
| 2351 | CTACAGGAAA TGGTGGGGGC ATTGCTGGGG GAAAAGCACA |
| | TTTCGATCGC |
| 2401 | ATTGATAATC TTACAGTCCA AAGCAACCAA GCAAAGAAAG |
| | GTGGTGGGGT |
| 2451 | TTATCTTGAA GATGCCCTCA TCCTGGAAAA GGTTATTACA |
| | GGTTCTGTCT |
| 2501 | CACAAAATAC AGCThCAGAA AGTGGTGGGG GTATCTACGC |
| | TAAGGATATT |
| 2551 | CAACTACAAG CTCTACCTGG AAGCTTCACA ATTACCGATA |
| | ATAAAGTCGA |
| 2601 | AACTAGTCTT ACTACTAGCA CTAATTTATA TGGTGGGGGC |
| | ATCTATTCCA |
| 2651 | GTGGAGCTGT CACGCPAACC AATATATCTG GAACCTTTGG |
| | CATTACAGGA |
| 2701 | AACTCTGTTA TCAATACAGC GACATCCCAG GATGCAGATA |
| | TACAAGGTGG |
| 2751 | GGGCATTTAT GCAACCACGT CTCTCTCAAT AAATCAATGT |
| | AATACACCCA |
| 2801 | TTCTATTTAG CAACAACTCT GCTGCCACTA AAAAAACATC |
| | AACAACAAAG |
| 2851 | CAAATTGCTG GTGGGGCTAT CTTCTCCGCT GCAGTAACTA |
| | TCGAGAATAA |
| 2901 | CTCTCAGCCC ATTATTTTCT TAAATAATTC CGCAAAGTCG |
| | GAAGCAACTA |
| 2951 | CAGCAGCAAC TGCAGGAAAT AAAGATAGCT GTGGAGGAGC |
| | CATTGCAGCT |
| 3001 | AACTCTGTTA CTTTAACAAA TAACCCTGAA ATAACCTTTA |
| | AAGGAAATTA |
| 3051 | TGCAGAAACT GOAGGAGOGA TTGGCTGTAT TGATCTTACT |
| | AATGGCTCAC |
| 3101 | CTCCCCGTAA AGTCTCTATT GCAGACAACG GTTCTGTCCT |
| | TTTTCAAGAC |
| 3151 | AACTCTGCGT TAAATCGCGG AGGCGCTATC TATGGAGAGA |
| | CTATCGATAT |
| 3201 | CTCCAGGACA GGTGCGACTT TCATCGGTAA CTCTTCAAAA |
| | CATGATGGAA |
| 3251 | GTGCAATTTG CTGTTCAACA GCCCTAACTC TTGCGCCAAA |
| | CTCCCAACTT |
| 3301 | ATCTTTGAAA ACAATAAGGT TACGGAAACC ACAGCCACTA |
| | CAAAAGCTTC |
| 3351 | CATAAATAAT TTAGGAGCTG CAATTTATGG AAATAATGAG |
| | ACTAGTGACG |
| 3401 | TCACTATCTC TTTATCAGCT GAGAATGGAA GTATTTTCTT |
| | TAAAAACAAT |
| 3451 | CTATGCACAG CAACAAACAA ATACTGCAGT ATTGCTGGAA |
| | ACGTAAAATT |
| 3501 | TACAGCAATA GAAGCTTCAG CAGGGAAAGC TATATCTTTC |
| | TATGATGCAG |
| 3551 | TTAACGTTTC CACCAAAGAA ACAAATGCTC AAGAGCTAAA |
| | ATTAAATGAA |
| 3601 | AAAGCGACAA GTACAGGAAC GATTCTATTT TCTGGGGAAC |
| | TTCACGAAAA |
| 3651 | TAAATCCTAT ATTCCACAGA AAGTCACTTT CGCACATGGG |
| | AATCTCATTC |
| 3701 | TAGGTAAAAA TGCAGAACTT AGCGTAGTTT CCTTTACCCA |
| | ATCTCCAGGC |
| 3751 | ACCACAATCA CTATGGGCCC AGGATCGCTT CTTTCCAACC |
| | ATAGCAAAGA |
| 3801 | AGOAGGAGGA ATCGCTATAA ACAATGTCAT CATTGATTTT |
| | AGTGAAATCG |
| 3851 | TTCCTACTAA AGATAATGCA ACAGTAGCTC CACCCACTCT |
| | TAAATTAGTA |
| 3901 | TCGAGAACTA ATGCAGATAG TAAAGATAAG ATTGATATTA |
| | CAGGAACTGT |
| 3951 | GACTCTTCTA GATCCTAATG GCAACTTATA TCAAAATTCT |
| | TATCTTGGTG |
| 4001 | AAGACCGCGA TATCACTCTT TTCAATATAG ACAATTCTGC |
| | AAGTGGGGCA |
| 4051 | GTTACAGCCA CGAATGTCAC CCTTCAAGGG AATTTAGGAG |
| | CTAAAAAAGG |
| 4101 | ATATTTAGGA ACCTGGAATT TGGATCCAAA TTCCTCGGGT |
| | TCAAAAATTA |
| 4151 | TTCTAAAATG GACCTTTGAC AAATACCTGC GCTGGCCCTA |
| | CATCCCTAGA |
| 4201 | GACAACCACT TCTACATCAA CTCTATTTGG GGAGCACAAA |
| | ACTCTTTAGT |
| 4251 | GACTGTGAAA CAAGGGATCT TAGGGAACAT GTTGAACAAT |
| | GCAAGGTTTG |
| 4301 | AAGATCCTGC TTTCAACAAC TTCTGGGCTT CGGCTATAGG |
| | ATCTTTCCTT |
| 4351 | AGGAAAGAAG TATCTCGAAA TTCTGACTCA TTCACCTATC |
| | ATGGCAGAGG |
| 4401 | CTATACCGCT GCTGTGGATG CCAAACCTCG CCAAGAATTT |
| | ATTTTAGGAG |
| 4451 | CTGCCTTCAG TCAGGTTTTT GGTCACGCCG AGTCTGAATA |
| | TCACCTTGAC |
| 4501 | AACTATAAGC ATAAAGGCTC AGGTCACTCT ACACAAGCAT |
| | CTCTTTATGC |
| 4551 | TGGCAATATC TTCTATTTTC CTGCGATACG GTCTCGGCCT |
| | ATTCTATTCC |
| 4601 | AAGGTGTGGC GACCTATGGT TATATGCAAC ATGACACCAC |
| | AACCTACTAT |
| 4651 | CCTTCTATTG AAGAAAAAAA TATGGCAAAC TGGGATAGCA |
| | TTGCTTGGTT |
| 4701 | ATTTGATCTG CGTTTCAGTG TGGATCTTAA AGAACCTCAA |
| | CCTCACTCTA |
| 4751 | CAGCAAGGCT TACCTTCTAT ACAGAAGCTG AGTATACCAG |
| | AATTCGCCAG |
| 4801 | GAGAAATTCA CAGAGCTAGA CTATGATCCT AGATCTTTCT |
| | CTGCATGCTC |
| 4851 | TTATGGAAAC TTAGCAATTC CTACTGGATT CTCTGTAGAC |
| | GGAGCATTAG |
| 4901 | CTTGGCGTGA GATTATTCTA TATAATAAAG TATCAGCTGC |
| | GTACCTCCCT |
| 4951 | GTGATTCTCA GGAATAATCC AAAAGCGACC TATGAAGTTC |
| | TCTCTACAAA |
| 5001 | AGAAAAGGGC AACGTAGTCA ACGTTCTCCC TACAAGAAAC |
| | GCAGCTCGTG |
| 5051 | CAGAGGTGAG CTCTCAAATT TATCTTGGAA GTTACTGGAC |
| ACTCTACGGC | |
| 5101 | ACGTATACTA TTGATGCTTC AATGAATACT TTAGTGCAAA |
| TGGCCAACGG | |
| 5151 | AGGGATCCGG TTTGTATTCT AG |

[0689] The PSORT algorithm predicts an outer membrane location (0.926).

[0690] The protein was expressed in E. coli and purified as a GST-fusion (FIG. 60A) or his-tagged product. The recombinant proteins were used to immunise mice, whose sera were used in Western blot (FIG. 60B) and FACS (FIG. 60C) analyses.

[0691] The cp6830 protein was also identified in the 2D-PAGE experiment (Cpn0540) and showed good cross-reactivity with human sera, including sera from patients with pneumonitis.

[0692] These experiments show that cp6830 is a surface-exposed and immunoaccessible protein, and that it is a useful immunogen. These properties are not evident from the sequence alone.

### Example 61

[0693] The following C. pneumoniae protein (PID 4376854) was expressed <SEQ ID 121; cp6854>:

| | |
|---|---|
| 1 | MSIAIAREQY AAILDMHPKP SIAMFSSEQA RTSWEKRQAH |
| | PYLYRLLEII |
| 51 | WGVVKFLLGL IFFIPLGLFW VLQKICQNFI LLGAGGWIFR |
| | PICRDSNLLR |
| 101 | QAYAARLFSA SEQDHVSSVR RVCLQYDEVF IDGLELRLPN |
| | AKPDRWMLIS |
| 151 | NQNSDCLEYR TVLQGEKDWI FRIAEESQSN ILIFNYPGVN |
| | KSQGNITRNN |
| 201 | VVKSYQACVR YLRDEPAGPQ ARQIVAYGYS LGASVQAEAL |
| | SKEIADGSDS |
| 251 | VRWFVVKDRG ARSTGAVAKQ FIGSLGVWLA NLTHWNINSE |
| | KRSKDLHCPE |
| 301 | LFIYQKDSQG NLIGDGLFKK ETCPAAPPLD PKNLEECSGK |
| | KIPVAQTGLR |
| 351 | HDHILSDDVI KEVAGHIQRH FDN* |

[0694] The cp6854 nucleotide sequence <SEQ ID 122> is:

| | |
|---|---|
| 1 | ATGTCAATAG CTATTGCAAG GGAACAATAC GCAGCTATAT |
| | TGGATATGCA |
| 51 | TCCTAAACCT TCGATCGCCA TGTTTTCTTC GGAGCAGGCG |
| | AGAACTTCTT |
| 101 | GGGAGAAACG ACAGGCTCAT CCTTACCTTT ATCGTCTTCT |
| | TGAGATCATA |
| 151 | TGGGGTGTTG TGAAATTTCT TCTCGGCTTA ATCTTCTTTA |
| | TTCCCTTGGG |
| 201 | TCTTTTCTGG GTCCTTCAGA AGATATGTCA GAATTTTATT |
| | CTTCTTGGTG |
| 251 | CAGGAGGGTG GATTTTTAGA CCCATATGCA GGGACTCTAA |
| | TTTATTGCGA |
| 301 | CAAGCTTACG CCGCGCGTCT TTTCTCCGCT TCATTCCAAG |
| | ATCATGTCTC |
| 351 | CTCTGTGCGA AQGGTTTGCT TACAGTATGA CGAGGTCTTT |
| | ATTGACGGAT |
| 401 | TGGAGTTACG TCTTCCCAAT GCTAAGCCAG ATCGATGGAT |
| | GTTAATCTCC |
| 451 | AATGGAAACT CCGATTGCTT AGAGTATAGG ACAGTGCTGC |
| | AAGGGGAAAA |
| 501 | GGACTGGATA TTCCGTATTG CTGAAGAGTC TCAATCCAAC |
| | ATTTTAATCT |
| 551 | TCAATTACCC AGGAGTCATG AAGAGCCAAG GGAATATAAC |
| | AAGAAACAAT |
| 601 | GTAGTCAAAT CTTATCAAGC ATGCQTACGC TATCTTAGAG |
| | ATGAACCCGC |
| 651 | AGGACCTCAG GCGCGTCAAA TCGTTGCTTA TGGCTATTCT |
| | TTAGGAGCTA |
| 701 | GTGTTCAAGC CGAAGCATTA AGTAAAGAGA TCGCAGACGG |
| | AAGTGATAGC |
| 751 | GTCOGTTGGT TTGTCGTTAA AGATCGAGGA GCTCGCTCTA |
| | CAGGAGCCGT |
| 801 | TGCTAAACAG TTTATTGGAA GTCTAGGAGT TTGGCTGGCG |
| | AATCTTACCC |
| 851 | ATTGGAATAT TAATTCTGAA AAGAGAAGCA AGGACTTGCA |
| | TTGCCCAGAA |
| 901 | CTCTTTATTT ATGGCAAGGA TTCCCAAGGT AATCTTATCG |
| | GGGATGGATT |
| 951 | GTTCAAAAAA GAGACGTGCT TCGCAGCACC ATTTTTAGAT |
| | CCTAAAAACT |
| 1001 | TGGAAGAGTG TTCAGGGAAG AAAATCCCTG TAGCTCAGAC |
| | CGGTCTAAGA |
| 1051 | CACGATCATA TCCTTTCCGA TGATGTGATT AAAGAAGTTG |
| | CAGGTCATAT |
| 1101 | TCAAAGACAT TTCGATAATT A |

[0695] The PSORT algorithm predicts an inner membrane location (0.461).

[0696] The protein was expressed in E. coli and purified as a GST-fusion product, as shown in FIG. 61A. The recombinant protein was used to immunise mice, whose sera were used in Western blot (FIG. 61B) and FACS (FIG. 61C) analyses. A his-tagged protein was also expressed.

[0697] These experiments show that cp6854 is a surface-exposed and immunoaccessible protein, and that it is a useful immunogen. These properties are not evident from the sequence alone.

### Example 62

[0698] The following C. pneumoniae protein (PID 4377101) was expressed <SEQ ID 123; cp7101>:

| | |
|---|---|
| 1 | MYSCYSKGIS HNYLLHPMSR LDIFVFDSLI ANQDQNLLEE |
| | EFCSEDTVLF |
| 51 | KAYRTTALQS PLAAKNLNIA RKVANYILAD NGEIDTVKLV |
| | EAIHHLSQCT |
| 101 | YPLGPHRHNE AQDREHLLKM LKALKENPKL KESIKTLFVP |
| | SYSTIQNLIR |
| 151 | HTLALNPQTI LSTIHVRQAA LTALFTYLRQ DVGSCFATAP |
| | AILIHQEYPE |
| 201 | EFLKDLNDLI SSGKLSRIVN QREIAVPINL SGCIGELFKP |
| | LRILDLYPDP |
| 251 | LVKLSSSPGL KKAFSAANIA ETLGDSEAQI QQLLSHQYLM |
| | QKLQNVHETL |
| 301 | TANDIIKSTL LHYYQLQEST VRAIFFKEGL FSKEQVAFST |
| | QHPRELSEIQ |
| 351 | RVYHYLHAYE EAKSAFIHDT QNPLLKAWEY TLATLADASQ |
| | PTISNHIRLA |
| 401 | LGWKSEDPUS LVSLVTHFVE EEVENIRILV QQCEQTYUEA |
| | RSQLEYIEGR |
| 451 | MRNPLNNQDS QILTMDHMRF RQELNKALYE WDSAQEKAKK |
| | FLHLPEFLLS |
| 501 | FYTKQIPLYE RSSYDAFIQE FAHLYANAPA GFRILFTHGR |
| | TEPNTWSPIY |
| 551 | SINEFIRFLS EFFTSTESEL LGKHAVINLE KETSRLVHNI |
| | TAMLHTDVFQ |
| 601 | EALLTRILEA YQLPVPPSIL NHLDQLSQTP WVYVSGGTVD |
| | TLLLDYFESS |
| 651 | EPLTLTEKHP ENPHELAAFY ADALKDLPTG IKSYLEEGSH |
| | SLLSSSPTHV |
| 701 | FSIIAGSPLF REAWDNDWYS YTWLRDVWVK QHQDFLQDTI |
| | LPQLSIYAFI |
| 751 | ENFCNKYALQ HVVHDFHDFC SDHSLTLPEL YDKGSRFLSS |
| | LFTKDKTVAL |
| 801 | IYIRRLLYLM VREVPYVSEQ QLPEVLDNVS SYLGISSRIT |
| | YEKFRSLIEE |
| 851 | TIPKMTLLSS ADLRHIYKGL LMQSYQKITY EEDTYLRLTT |
| | AMRHHNLAYP |
| 901 | APLLFADSNW PSIYFGFILM PGTTEIDLWK FNYAGLQGQP |
| | LDNIQELEAT |
| 951 | SRPWTLYANP IDYGMPPPPG YRSPLPKBFF * |

[0699] The cp7101 nucleotide sequence <SEQ ID 124> is:

| | |
|---|---|
| 1 | ATGTATTCGT GTTACAGCAA AGGAATATCC CATAACTATC |
| | TTCTACATCC |
| 51 | TATGTCACGT TTGGATATTT TTGTTTTCGA TTCTCTGATC |
| | GCAAACCAGG |
| 101 | ATCAAAATCT TCTTGAGGAA ATTTTCTGTT CTGAAGACAC |
| | AGTTTTATTT |
| 151 | AAAGCCTACC GTACTACGGC TCTACATTCC CCTCTAGCTG |
| | CTAAGAACCT |
| 201 | AAATATCGCC CGTAAAGTCG CAAATTATAT CTTAGCTGAC |
| | AATGGGGAAA |
| 251 | TCGATACAGT AAAGCTTGTC GAAGCCATTC ACCATCTCTC |
| | ACAATGTACC |
| 301 | TATCCTTTAG GGCCTCATCG CCATAATGAA GCTCAAGATC |
| | GTGAACACCT |
| 351 | CCTTAAAATG CTAAAAGCTC TAAAGGAAAA TCCTAAATTA |
| | AAAGAAAGCA |
| 401 | TCAAAACTCT CTTTGTCCCT TCATACTCTA CAATCCAAAA |
| | CCTAATTCGC |
| 451 | CATACACTAG CATTGAATCC ACAGACAATT CTCTCTACGA |
| | TTCATGTGCG |
| 501 | TCAAGCAGCA CTCACAGCGC TCTTCACCTA CCTTCGGCAA |
| | GATGTAGGTT |
| 551 | CCTGTTTTGC TACGGCTCCT GCCATTCTCA TTCACCAAGA |
| | ATATCCAGAA |
| 601 | CGATTCCTTA AAGATCTCAA TGATCTCATT AGCAGTGGCA |
| | AACTCTCTAG |
| 651 | AATCGTAAAC CAAAGGGAAA TTGCGGTTCC TATAAACCTT |
| | TCGGGATGCA |
| 701 | TTGGAGAGCT ATTCAAGCCT TTAAGGATTC TAGATCTTTA |
| | TCCTGATCCT |
| 751 | CTGGTTAAGC TCTCCTCATC TCCAGGACTC AAAAAAGCCT |
| | TTTCTGCTGC |
| 801 | CAATCTTATT GAAACTCTTG GGGATTCTGA AGCACAAATC |
| | CAACAGTTGC |
| 851 | TCTCGCATCA ATATTTGATG CAAAAACTAC AAAATGTCCA |
| | TGAGACCTTA |
| 901 | ACTGCTAACG ACATTATCAA ATCGACACTT CTGCACTACT |
| | ATCAGCTCCA |
| 951 | AGAAAGTACT GTACGAGCTA TTTTCTTCAA AGAAGGGTTG |
| | TTCAGCAAAG |
| 1001 | AACAAGTGGC ATTCTCGACG CAACACCCCA GAGAGCTCTC |
| | AGAAATACAA |
| 1051 | CGGGTATACC ACTACTTACA TGCCTATGAA GAAGCAAAAT |
| | CTGCTTTTAT |
| 1101 | CCATGACACT CAAAATCCCT TACTGAAAGC CTGGGAGTAT |
| | ACTTTAGCGA |
| 1151 | CTCTTGCGGA TGCTAGCCAA CCTACCATCT CAAACCATAT |
| | CCGCCTTGCC |
| 1201 | TTAGGATGGA AAAGTGAAGA CCCTCACAGT CTTGTATCTC |
| | TAGTTACACA |
| 1251 | CTTTGTTGAA GAGGAAGTAG AAAACATCCG AATTTTAGTC |
| | CAACAATGTG |
| 1301 | AACAGACCTA TCACGAAGCA CGCTCCCAAC TAGAATATAT |
| | TGAAGGGCGG |
| 1351 | ATGCGCAACC CACTAAATAA TCAAGACAGT CAGATTTTGA |
| | CGATGGATCA |
| 1401 | CATGCGCTTC CGTCAAGAAC TCAATAAAGC TCTTTATGAG |
| | TGGGATAGTG |
| 1451 | CTCAAGAAAA GGCAAAGAAA TTTCTACATC TTCCTGAATT |
| | CTTACTTTCT |
| 1501 | TTCPATACAA AGCAAATTCC CTTATACTTT CGTAGTTCTT |
| | ACGATGCCTT |
| 1551 | CATTCAAGAA TTTGCTCATC TCTATGCTAA TGCTCCCGCT |
| | GGCTTCCGTA |
| 1601 | TTCTTTTCAC GCATGGACGC ACCCATCCGA ACACATGGTC |
| | CCCCATCTAT |
| 1651 | TCGATTAATG AATTTATACG TTTTCTTTCT GAATTCTTCA |
| | CCTCCACAGA |
| 1701 | GTCAGAACTT CTGGGGAAAC ATGCCGTGAT CAATTTAGAG |
| | AAAGAAACAT |
| 1751 | CTCGGCTCGT CCACAACATC ACTGCCATGC TACACACGGA |
| | TGTTTTCCAA |
| 1801 | GAAGCTCTCC TTACAAGAAT TTTAGAAGCC TATCAGCTTC |
| | CTGTGCCTCC |
| 1851 | CTCCATCTTA AACCACTTAG ATCAGCTGTC ACAAACTCCC |
| | TGGGWTTATG |
| 1901 | TTTCTGGAGG AACAGTGGAC ACTCTTCTTT TGGATTATTT |
| | TGAAAGCTCA |
| 1951 | GAACCTCTGA CACTTACAGA AAAGCATCCT GAAAATCCTC |
| | ATGAGCTTGC |
| 2001 | AGCTTTCTAC GCAGACGCCC TTAAAGATCT CCCTACAGGA |
| | ATTAAAAGTT |
| 2051 | ATCTAGAAGA AGGATCCCAC TCTCTACTTA GCTCATCACC |
| | CACCCACGTT |
| 2101 | TTCTCTATAA TCGCAGGATC TCCTTTATTT CGGQAAGCTT |
| | GGGATAATGA |
| 2151 | TTGGTACAGC TATACCTGGC TTCGTGATGT CTGGGTGAAA |
| | CAACACCAAG |
| 2201 | ATTTCCTTCA AGATACTATA TTACCTCAGC TAAGTATCTA |
| | TGCTTTCATA |
| 2251 | GAGAATTTTT GTAACAAATA TGCTTTGCAA CATGTAGTTC |
| | ATGACTTTCA |
| 2301 | TGATTTCTGC TCCGACCACT CCTTGACTCT TCCGGAGCTC |
| | TATGACAAAG |
| 2351 | GATCGCGTTT TCTAAGCTCC TTATTCACCA AAGATAAGAC |
| | CGTAGCTCTT |
| 2401 | ATCTATATAC GCCGTCTTCT CTACCTTATG GTCCGTGAAG |
| | TCCCTTATGT |
| 2451 | TTCAGAACAA CAGCTTCCAG AAGTCTTRGA TAACGTCTCT |
| | TCATATCTCG |
| 2501 | GGATTTCCTC TCGTATTACC TATGAGAAAT TCCGCTCCCT |
| | GATAGAGGAA |
| 2551 | ACCATCCCTA AAATGACCTT ACTCTCCTCA GCAGACCTGA |
| | GGCATATCTA |
| 2601 | TAAAGGTCTC CTCATGCAAA GTTATCAAAA GATCTACACC |
| | GAAGAAGATA |
| 2651 | CGTACCTCCG CCTCACCACG GCAATGAGGC ATCATAATCT |
| | TGCCTATCCC |
| 2701 | GCTCCTTTGC TCTTTGCAGA CAGTAACTGG CCTTCTATTT |
| | ATTTTGGATT |
| 2751 | CATCCTAAAT CCAGGAACCA CAGAGATCGA TCTTTGGAAA |
| | TTTAACTATG |
| 2801 | CAGGGCTGCA AGGACAGCCT CTTGACAATA TCCAGGAGCT |
| | GTTCGCAACG |
| 2851 | TCAAGACCCT GGACCCTCTA TGCAAATCCT ATAGATTATG |
| | GCATGCCACC |
| 2901 | GCCTCCAGGC TACCGCAGCC GCCTCCCTAA AGAATTTTTC |
| | TAG |

[0700] The PSORT algorithm predicts a cytoplasmic location (0.206).

[0701] The protein was expressed in E. coli and purified as a GST-fusion (FIG. 62A) or his-tagged product. The proteins were used to immunise mice, whose sera were used in Western blot (FIG. 62B) and FACS (FIG. 62C) analyses.

[0702] This protein also showed good cross-reactivity with human sera, including sera from patients with pneumonitis.

[0703] These experiments show that cp7101 is a surface-exposed and immunoaccessible protein, and that it is a useful immunogen. These properties are not evident from the sequence alone.

### Example 63

[0704] The following C. pneumoniae protein (PID 4377107) was expressed <SEQ ID 125; cp7107>:

| | |
|---|---|
| 1 | MSIVRTSALP LPCLSRSETF KKVRSHMKFM KVLTPWIYRK |
| | DLWVTAFLLT |
| 51 | AIPGSFARTL VDIAGEPRHA AQATGVSGDG KIVIGMKVPD |
| | DPFAITVGPQ |
| 101 | YIDGHLQPLE AVRPQOSVYP NGITPDGTVI VGTNYAIGMG |
| | SVAVKWVNGI |
| 151 | VSELPMLPDT LDSVASAVSA DGRVIGGNRN XNLGASVAVK |
| | WEDDVITQLP |
| 201 | SLPDAMNACV NGISSDGSII VGTMVDVSWR NTAVQWIGDQ |
| | LSVIGTLGGT |
| 251 | TSVASAISTD GTVIVGGSEN ADSQTHAYAY KNGVMSDIGT |
| | LGGFYSLAHA |
| 301 | VSSDGSVIVG VSTNSEHRYH AFQYADGQMV DLGTLGGPES |
| | YAQGVSDGDK |
| 351 | VIVGKAQVPS GDWHAPLCPF QAPSPAPVHG GSTVVTSQNP |
| | RGMVDINATY |
| 401 | SSLKNSQQQL QRLLIQHSAK VESVSSGAPS PTSVKGAISK |
| | QSPAVQNDVQ |
| 451 | KGTFLSYRSQ VHGNVQNQQL LTGAFMLWKL ASAPKCGFKV |
| | ALHYGSQDAL |
| 501 | VERAALPYTE QGLGSSVLSG FGGQVQGRYD FNLGETVVLQ |
| | PFMGIQVLHL |
| 551 | SREGYSEKNV RFPVSYDSVA YSAATSFNGA RVFASLSPKM |
| | STAATLGVER |
| 601 | DLNSHIDEFK GSVSAMGNFV LENSTVSVLR PFASLAMYYD |
| | VRQQQLVTLS |
| 651 | VVMNQQPLTG TLSLVSQSSY NLBF* |

[0705] The cp7107 nucleotide sequence <SEQ ID 126> is:

| | |
|---|---|
| 1 | ATGAGTATAG TCAGAAATTC TGCATTGCCA CTTCCGTGTT |
| | TAAGCAGATC |
| 51 | CGAAACCTTT AAAAAAGTTA GGTCGCATAT GAAATTTATG |
| | AAAGTCCTTA |
| 101 | CTCCATGGAT TTATCGAAAA GATCTTTGGG TAACAOCATT |
| | CTTACTGACA |
| 151 | GCAATTCCAG GATCTTTTGC ACATACTCTT GTTGATATAG |
| | CAGGAGAACC |
| 201 | TCGGCATGCT GCTCAAGCAA CAGGAGTTTC TGGAGATGGT |
| | AAAATTGTTA |
| 251 | TAGGAATGAA AGTTCCGGAT GATCCTTTTG CTATAACTGT |
| | AGGATTTCAA |
| 301 | TATATTGATG GGCATTTGCA ACCCTTAGAG GCAGTACGTC |
| | CTCAATGCTC |
| 351 | TGTATACCCT AATGGTATAA CCCCGGACGG AACGGTTATT |
| | GTGGGTACAA |
| 401 | ACTATCCCAT CGGGATGGGT AGTGTTGCTG TGAAATGGGT |
| | AAATGGCAAG |
| 451 | GTTTCTGAAC TTCCCATGCT CCCTGACACC CTCGATTCTG |
| | TAGCATCGGC |
| 501 | AGTTTCTGCA GATGGAAGAG TGAPTGGAGG GAATAGAAAT |
| | ATAAATCTTG |
| 551 | GCGCTTCTGT TGCTGTGAAA TGGGAGGACG ACGTGATTAC |
| | ACAACTTCCT |
| 601 | TCTCTTCCTG ATGCTATCAA TGCTTGTGTT AACCGAATTT |
| | CTTCAGATGG |
| 651 | TTCTATAATT GTAGGAACCA TGGTAGACGT GTCATGGAGA |
| | AATACCGCAG |
| 701 | TACAATGGAT CGGGGATCAG CTCTCTGTTA TTGGGACTTT |
| | AGGAGGAACT |
| 751 | ACTTCTGTTG CTAGTGCAAT CTCAACAGAT GGCACTGTGA |
| | TTGTAGGAGG |
| 801 | TTCTGAAAAT GCAGATTCTC AGACTCATGC CTATGCTTAT |
| | AAAAACGGTG |
| 851 | TTATGAGCGA TATAGGGACC CTCGGAGGTT TTTATTCTTT |
| | AGCACATGCA |
| 901 | GTATCTTCAG ATGGTTCTGT GATTGTAGGA GTATCCACGA |
| | ACTCTGAGCA |
| 951 | TAGATATCAT GCATTCCAAT ATGCTGATGG ACAGATGGTA |
| | GATTTAGGAA |
| 1001 | CTTTAGGAGG GCCTGAATCT TATGCTCAAG GTGTGTCTGG |
| | AGATGGAAAG |
| 1051 | GTAATTGTGG GTACAGCACA AGTACCATCT GGAGATTGGC |
| | ATGCGTTCCT |
| 1101 | ATGTCCTTTC CAAGCTCCGA GCCCTGCTCC TGTCCATGGG |
| | GGAAGCACTG |
| 1151 | TCGTAACTAG CCAGAATCCA CGTGGAATGG TAGATATCAA |
| | TGCTACCTAC |
| 1201 | TCCTCTTTGA AAAATAGCCA ACAACAACTA CAAAGATTGC |
| | TTATCCAGCA |
| 1251 | TAGTGCAAAA GTTGAAAGTG TATCCTCAGG AGCACCATCT |
| | TTTACAAGTG |
| 1301 | TGAAAGGTGC GATCTCAAAA CAGAGCCCTG CAGTGCAAAA |
| | TGATGTACAG |
| 1351 | AAAGGGACGT TTTTAAGTTA CCGTTCCCAA GTTCATGGAA |
| | ACGTGCAGAA |
| 1401 | TCAGCAATTG CTCACAGGAG CTTTTATGGA CTGGAAACTC |
| | GCTTCAGCTC |
| 1451 | CTAAATGCGG CTTTAAAGTA OCTOTOCACT ATGGCTCTCA |
| | AGATGCTCTC |
| 1501 | GTAGAACGTG CAGCTCTTCC TTACACAGAA CAAGGCTTAG |
| | GAAGCAGTGT |
| 1551 | CTTCTCAGGT TTTGGAGGAC AAGTTCAAGG ACGCTATGAC |
| | TTTAATTTAG |
| 1601 | GAGAAACTGT TGTTCTGCAA CCCTTTATGG GCATTCAAGT |
| | TCTCCACCTA |
| 1651 | AGTAGAGAAG GGTATTCTGA GAAGAATGTT CGATTTCCTG |
| | TAAGCTATGA |
| 1701 | TTCTGTAGCC TACTCAGCAG CTACTAGCTT TATGGGTGCG |
| | CATGTATTTG |
| 1751 | CCTCCCTAAG CCCTAAAATG AGTACAGCAG CAACTTTAGG |
| | TGTGGAGAGA |
| 1801 | GATCTGAATT CACATATAGA TGAATTTAAG GGATCCGTCT |
| | CTGCTATGGG |
| 1851 | AAACTTTGTC TTGGAAAATT CTACAGTGAG TGTTTTAAGA |
| | CCTTTTGCTT |
| 1901 | CTCTTGCTAT GTACTATGAC GTAAGACAAC AGCAACTCGT |
| | GACGTTGTCA |
| 1951 | GTAGTTATGA ATCAACAACC CTTAACAGGC ACACTAAGCT |
| | TAGTAAGCCA |
| 2001 | AAGTAGCTAT AATCTTAGCT TCTAA |

[0706] The PSORT algorithm predicts an inner membrane location (0.100).

[0707] The protein was expressed in E. coli and purified as a GST-fusion (FIG. 63A) or his-tagged product. The proteins were used to immunise mice, whose sera were used in Western blot (FIG. 63B) and FACS (FIG. 63C) analyses.

[0708] These experiments show that cp7107 is a surface-exposed and immunoaccessible protein, and that it is a useful immunogen. These properties are not evident from the sequence alone.

### Example 64

[0709] The following C. pneumoniae protein (PID 4376467) was expressed <SEQ ID 127; cp6467>:

| | |
|---|---|
| 1 | MLRFFAVFIS TLWLITSGCS PSQSSKGFV VNMKEMPRSL |
| | DPGKTRLIAD |
| 51 | QTLMRHLYEG LVEEHSQNGE IKPALAESYT ISEDGTRYTF |
| | KIKNILWSNG |
| 101 | DPLTAQDFVS SWKEILKEDA SSVYLYAFLP IKNAEAIFDD |
| | TESPENLGVR |
| 151 | ALDKRHLEIQ LETPCAHFLH FLThPIFFPV HETLRNYSTS |
| | FEEMPITCGA |
| 201 | PRPVSLERGL RLBLBKNPMY HNKSRVKLHK IIVQFISNAN |
| | TAAILFKHKK |
| 251 | LDWQGPPWGE PIPPEXSABL HQDDQLFSLP GASTTWLLFN |
| | IQKKPWNNAR |
| 301 | LRKALSLAID KDMLTKVVYQ GLAEPTDHIL HPRLYPGTYP |
| | ERKRQNERIL |
| 351 | EAQQLFEEAL VELQMTREDL EKETLTFSTF SFSYGRICQM |
| | LREQWKKVLR |
| 401 | FTIPIVGQEF FTIQKNFLEG NYSLTVNQWT AAFIDPMSYL |
| | MIFANPGGIS |
| 451 | PYHLQDSHFQ TLLIKITQEH KKHLRNQLII EALDYLEHCH |
| | ILEPLCHPNL |
| 501 | RIALNKNIKN FNLFVRRTSD FRFIEKL* |

[0710] A predicted signal peptide is highlighted.

[0711] The cp6467 nucleotide sequence <SEQ ID 128> is:

| | |
|---|---|
| 1 | ATGCTCCGTT TCTTCGCTGT ATTTATATCA ACTCTTTGGC |
| | TCATTACCTC |
| 51 | AGGATGTTCC CCATCCCAAT CCATCCCAAT AATTTTTGTG |
| | GTAAATATGA |
| 101 | AGGAAATGCC ACGCTCCTTG GATCCTGGAA AAACTCGTCT |
| | CATTCCAGAC |
| 151 | CAAACTCTAA TGCGTCATCT ATATGAAGGA CTCGTCGAAG |
| | AACATTCCCA |
| 201 | AAATGGAGAG ATTAAACCAG CCCTTGCAGA AAGCTACACC |
| | ATCTCCGAAG |
| 251 | ACGGGACTCG GTACACATTT AAAATCAAAA ACATCCTTTG |
| | GAGTAACGGA |
| 301 | GACCCTCTGA CAGCTCAAGA CTTTGTCTCC TCTTGGAAGG |
| | AAATCCTAAA |
| 351 | GGAAGATGCG TCCTCCGTAT ATCTCTATGC GTTTTTACCT |
| | ATCAAAAATG |
| 401 | CTCGGGCAAT CTTTGATGAT ACTGAGTCTC CAGAAAATCT |
| | AGGAGTCCGA |
| 451 | GCTTTAGATA AGCGTCATCT CGAAATTCAG TTAGAAACTC |
| | CCTGCGCGCA |
| 501 | TTTCCTACAT TTCTTGACTC TTCCTATTTT TTTCCCTGTT |
| | CATGAAACTC |
| 551 | TGCGAAACTA TAGCACCTCT TTTGAAGAGA TGCCCATTAC |
| | CPGCGGTCCT |
| 601 | TTCCGCCCPG TGTCTCTAGA AAAAGGCCTG AGACTCCATC |
| | TAGAGAAAAA |
| 651 | CCCTATGTAC CATAATAAAA GCCGTGTGAA ACTACATAAA |
| | ATTATTGTAC |
| 701 | AGTTTATCTC AAACGCTAAC ACTGCAGCCA TTCTATTCAA |
| | ACATAAGAAA |
| 751 | TTAGATTGGC AAGGACCTCC TTGGGGAGAA CCTATCCCTC |
| | CAGAAATCTC |
| 801 | AGCPTCTCTA CATCAAGATG ACCAGCTCTT TTCTCTTCCG |
| | GGCGCTTCGA |
| 851 | CTACATGGTT ACTCTTTAAT ATACAAAAAA AACCTTGGAA |
| | CAATGCTAAA |
| 901 | TTACGCAAGG CATTGAGCCT TGCAATAGAC AAAGATATGT |
| | TAACCAAAGT |
| 951 | GGTATACCAA GGTCTTGCAG AACCTACAGA TCATATCCTA |
| | CATCCAACAC |
| 1001 | TTTATCCAGG GACCTATCCC GAACGGAAAA GACAAAACGA |
| | AAGAATTCTT |
| 1051 | GAGGCTCAAC AACTCTTTGA AGAAGCTCTA GACGAACTTC |
| | AAATGACACG |
| 1101 | CGAAGATCTA GAAAAGGAAA CTTTGACTTT CTCAACCTTT |
| | TCTTTTTCTT |
| 1151 | ACGGAAGGAT TTGCCAAATG CTAAGAGAAC AATGGAACAA |
| | AGTCTTAAAA |
| 1201 | TTTACTATCC CTATAGTAGG CCAAGAGTTT TTCACAATAC |
| | AAAAAAACTT |
| 1251 | CCTAGAGGGG AACTATTCCC TAACCGTGAA CCAATGGACC |
| | GCAGCAATTA |
| 1301 | TTGATCCGAT GTCTTATCTC ATGATCTTTG CCAATCCTGG |
| | AGGAATTTCC |
| 1351 | CCCTATCACC TCCAAGATTC ACACTTTCAA ACTCTTCTCA |
| | TAAAGATCAC |
| 1401 | TCAAGAACAT AAAAAACACC TACGAAATCA GCTTATTATT |
| | GAAGCCCTTG |
| 1451 | ACTATTTAGA ACACTGTCAC ATTCTCGAAC CACTATGTCA |
| | TCCAAATCTT |
| 1501 | CGAATTGCTT TGAACAAAAA CATTAAAAAC TTTAATCTTT |
| | TTGTTCGACG |
| 1551 | AACTTCAGAC TTTCGTTTTA TAGAAAAACT ATAG |

[0712] The PSORT algorithm predicts an outer membrane lipoprotein (0.790).

[0713] The protein was expressed in E. coli and purified as a his-tag product and a GST-fusion protein, as shown in FIG. 64A. The recombinant his-tag protein was used to immunise mice, whose sera were used in a Western blot (FIG. 64B). The recombinant GST-fusion protein was also used to immunise mice, whose sera were used in a Western blot (FIG. 64C) and for FACS analysis (FIG. 64D).

[0714] These experiments show that cp6467 is a surface-exposed and immunoaccessible protein, and that it is a useful immunogen. These properties are not evident from the sequence alone.

### Example 65

[0715] The following C. pneumoniae protein (PID 4376679) was expressed <SEQ ID 129; cp6679>:

| | |
|---|---|
| 1 | MRKMLVLLAS LGLLSPTLSS CTHLGSSGSY HPKLYTSGSK TKGVIAMLPV |
| 51 | FHRPGKSLEP LPWNLQGEFT EEISKKFYAS EKVFLIKHNA SPQTVSQFYA |
| 101 | PIANRLPETI IEQFLPAEFI VATELLEQKT GKEAGVDSVT ASVRVRVFDI |
| 151 | RHHKIALIYQ EIIECSQPLT TLVNDYHRYG WNSKHFDSTP MGLMHSRLFR |
| 201 | EVVARVEGYV CANYS* |

[0716] A predicted signal peptide is highlighted.

[0717] The cp6679 nucleotide sequence <SEQ ID 130> is:

| | |
|---|---|
| 1 | ATGCGAAAAA TGTTGGTATT ATTG~CATCT TTAGGACTTC TATCCCCAAC |
| 51 | CCTATCCAGC TGCACTCACT TAGGCTCTTC AGGAAGTTAT CATCCTAAGC |
| 101 | TATACACTTC AGGGAGCAAA ACTAAAGGTG TGATTGCGAT GCTTCCTGTA |
| 151 | TTTCATCGCC CAGGAAAGAG TCTTGAACCT TTACCTTGGA ACCTCCAAGG |
| 201 | AGAATTTACT GAAGAGATCA GCAAAAGGTT TTATGCTTCG GAAAAGGTCT |
| 251 | TCCTGATCAA GCACAATGCT TCACCTCAGA CAGTCTCTCA GTTCTATGCT |
| 301 | CCGATTGCGA ATCGTCTACC CGAAACAATT ATTGAGCAAT TTCTTCCTGC |
| 351 | AGAATTCATT GTTGCTACAG AACTGTTAGA ACAAAAGACA GGGAAAGAAG |
| 401 | CAGGTGTCGA TTCTGTAACA GCGTCTGTAC GTGTTCGCGT TTTTGATATC |
| 451 | CGTCATCATA AAATAGCTCT CATTTATCAA GAGATTATCG AATGCAGCCA |
| 501 | GCCTTTAACT ACCCTAGTCA ATGATTATCA TCGCTATGGC TGGAACTCAA |
| 551 | AACATTTTGA TTCAACGCCC ATGGGCTTAA TGCATAGCCG TCTTTTCCGC |

[0718] The PSORT algorithm predicts an inner membrane location (0.149).

[0719] The protein was expressed in E. coli and purified as a his-tag product (FIG. 65A) and as a GST-fusion product (FIG. 65B). The recombinant protein was used to immunise mice, whose sera were used in a Western blot (FIG. 65C) and for FACS analysis.

[0720] These experiments show that cp6679 is a surface-exposed and immunoaccessible protein, and that it is a useful immunogen. These properties are not evident from the sequence alone.

### Example 66

[0721] The following C. pneumoniae protein (PID 4376890) was expressed <SEQ ID 131; cp6890>:

| | |
|---|---|
| 1 | MKQLLFCVCV FAMSCSAYAS PRRQDPSVMK ETFRNNYGII VSGQEWVKRG |
| 51 | SDGTITKVLK NGATLHEVYS GGLLHGEITL TFPHTTALDV VQIYDQGRLV |
| 101 | SRKTFFVNGL PSQEELFNED GTFVLTRWPD NNDSDTITKP YFIETTYQGH |
| 151 | VIEGSYTSFN GKYSSSIHNG EGVRSVFSSN NILLSEETFN EGVMVKYTTF |
| 201 | YPNRDPESIT HYQNGQPHGL RLTYLQGGIP NTIEEWRYGF QDGTTIVFKN |
| 251 | GCKTSEIAYV KGVKEGLELR YNEQEIVAEE VSWRNDFLHG ERKIYAGGIQ |
| 301 | KHEWYYRGRS VSKAKFERLN AAG* |

[0722] A predicted signal peptide is highlighted.

[0723] The cp6890 nucleotide sequence <SEQ ID 132> is:

| | |
|---|---|
| 1 | ATGAAACAAT TACTTTTCTG TGTTtGCGTA TTTGCTATGT CATGTTCTGC |
| 51 | TTACGCATCC CCACGACGAC AAGATCCTTC TGTTATGAAG GAAACATTCC |
| 101 | GAAATAATTA TGGCATTATT GTTTCCGGTC AAGAATGGGT AAAGCGTGGT |
| 151 | TCTGACGGCA CCATCACCAA AGTACTCAAA AATOGAGCTA CCCTGCATGA |
| 201 | AGTTTATTCT GGAGGCCTCC TTCATGGGGA AATTACCTTA ACGTTTCCCC |
| 251 | ATACCACAGC ATTGGACGTT GTTCAAATCT ATGATCAAGG TAGACTCGTT |
| 301 | TCTCGCAAAA CCTTTTTTGT GAACGGTCTT CCATCTCAAG AAGAGCTGTT |
| 351 | CAATGAAGAT GGCACGTTTG TCCTCACACG ATGGCCGGAC AACAACGACA |
| 401 | GTGATACCAT CACAAAGCCT TACTTCATAG AAACGACATA TCAAGGGCAT |
| 451 | GTCATAGAAG GAAGTTATAC TTCCTTTAAT GGGAAATACT CCTCATCCAT |
| 501 | CCACAATGGA GAGGGAGTTC GTTCTGTGTT CTCCTCCAAT AACATCCTTC |
| 551 | TTTCTGAAGA GACCTTCAAT GAAGGTGTCA TGGTGAAATA TACCACATTC |
| 601 | TATCCGAATC GCGATCCCGA ATCGATTACT CATTATCAAA ATGGACAGCC |
| 651 | TCACGGCTTA CGGCTAACAT ATCTACAAGG TGGCATCCCC AATACGATAG |
| 701 | AGGAGTGGCG TTATGGCTTT CAAGACGGAA CGACCATCGT ATTTAAAAAT |
| 751 | GGTTGTAAGA CATCTGAGAT CGCTTATGTT AAGGGAGTGA AAGAAGGTTT |
| 801 | AGAACTGCGC TACAATGAAC AGGAAATTGT AGCTGAAGAA GTTTCTTGGC |
| 851 | GTAATGATTT TCTGCATGGA GAACGTAAGA TCTATGCTGG AGGAATCCAA |
| 901 | AAGCATGAAT GGTATTACCG CGGGAGATCT GTATCTAAAG CCAAATTCGA |
| 951 | GCGGCTAAAT GCTGCAGGAT AG |

[0724] The PSORT algorithm predicts an outer membrane location (0.940).

[0725] The protein was expressed in E. coli and purified as a GST-fusion product, as shown in FIG. 66A. The recombinant protein was used to immunise mice, whose sera were used in a Western blot (FIG. 66B) and for FACS analysis. A his-tagged protein was also expressed.

[0726] These experiments show that cp6890 is a surface-exposed and immunoaccessible protein, and that it is a useful immunogen. These properties are not evident from the sequence alone.

### Example 67

[0727] The following C. pneumoniae protein (PID 6172323) was expressed <SEQ ID 133; cp0018>:

| | |
|---|---|
| 1 | MKTSVSMLLA LLCSGASSIV LHAATTPLNP EDGFIGEGNT NTFSPKSTTD |
| 51 | AAGTTYSLTG EVLYIDPGKG GSITGTCFVE TAGDLTFLGN GNTLKFLSVD |
| 101 | AGANIAVAHV QGSKNLSFTD FLSLVITESP KSAVTTGKGS LVSLGAVQLQ |
| 151 | DINTLVLTSN ASVEDGGVIK GNSCLIQGIK NSAIFGQNTS SKKGGAISTT |
| 201 | QGLTIENNLG TLKFNENKAV TSGGALDLGA ASTFTANHEL IFSQNKTSGN |
| 251 | AANGGAINCS GDLTFTDNTS LLLQENSTMQ DGGALCSTGT ISITGSDSIN |
| 301 | VIGNTSGQKG GAISAASLKI LGGQGGALFS NNVVTHATPL GGAIFINTGG |
| 351 | SLQLFTQGGD IVPEGNQVTT TAPNATTKRN VIHLESTAKW TGLAASQGNA |
| 401 | IYFYDPITTN DTGASDNLRI NEVSANQKLS GSIVFSGERL STAEAIAENL |
| 451 | TSRINQPVTL VEGSLVLKQG VTLITQGFSQ EPESTLLLDL GTSL* |

[0728] A predicted signal peptide is highlighted.

[0729] The cp0018 nucleotide sequence <SEQ ID 134> is:

| | |
|---|---|
| 1 | ATGAAGACTT CAGTTTCTAT GTTGTTGGCC CTGCTTTGCT CGGGGGCTAG |
| 51 | CTCTATTGTA CTCCATGCCG CAACCACTCC ACTAAATCCT GAAGATGGGT |
| 101 | TTATTGGGGA GGGCAATACA AATACTTTTT CTCCGAAATC TACAACGGAT |
| 151 | GCTGCAGGAA CTACCTACTC TCTCACAGGA GAGGTTCTGT ATATAGATCC |
| 201 | GGGGAAAGGT GGTTCAATTA CAGGAACTTG CTTTGTAGAA ACTGCTGGCG |
| 251 | ATCTTACATT TTTAGGTAAT GGAAATACCC TAAAGTTCCT GTCGGTAGAT |
| 301 | GCAGGTGCTA ATATCGCGGT TGCTCATGTA CAAGGAAGTA AGAATTTAAG |
| 351 | CTTCACAGAT TTCCTTTCTC TGGTGATCAC AGAATCTCCA AAATCCGCTG |
| 401 | TTACTACAGG AAAAGGTAGC CTAGTCAGTT TAGGTGCAGT CCAACTGCAA |
| 451 | GATATAAACA CTCTAGTTCT TACAAGCAAT GCCTCTGTCG AAGATGGTGG |
| 501 | CGTGATTAAA GGAAACTCCT GCTTGATTCA GGGAATCAAA AATAGTGCGA |
| 551 | TTTTTGGACA AAATACAPCT TCGAAAAAAG GAGGGGCGAT CTCCACGACT |
| 601 | CAAGGACTTA CCATAGAGAA TAACTTAGGG ACGCTAAAGT TCAATGAAAA |
| 651 | CAAAGCAGTG ACCTCAGGAG GCGCCTTAGA TTTAGGAGCC GCGTCTACAT |
| 701 | TCACTGCGAA CCATGAGTTG ATATTTTCAC AAAATAAGAC TTCTGGGAAT |
| 751 | GCTGCAAATG GCGGAGCCAT AAATTGCTCA GGGGACCTTA CATTTACTGA |
| 801 | TAACACTTCT TTGTTACTTC AAGAAAATAG CACAATGCAG GATGGTGGAG |
| 851 | CTTTGTGTAG CACAGGAACC ATAAGCATTA CCGGTAGTGA TTCTATCAAT |
| 901 | GTGATACGAA ATACTTCAGG ACAAAAAGGA GGAGCGATTT CTGCAGCTTG |
| 951 | TCTCAAGATT TTGGGAGGGC AGGGAGGCGC TCTCTTTTCT AATAACGTAG |
| 1001 | TGACTCATGC CACCCCTCTA GGAGGTGCCA TTTTTATCAA CACAGGAGGA |
| 1051 | TCCTTGCAGC TCTTCACTCA AGGAGGGGAT ATCGTATTCG AGGGGAATCA |
| 1101 | GGTCACTACA ACAGCTCCAA ATGCTACCAC TAAGAGAAAT GTAATTCACC |
| 1151 | TCGAGAGCAC CGCGAAGTGG ACGGGACTTG CTGCAAGTCA AGGTAACGCT |
| 1201 | ATCTATTTCT ATGATCCCAT TACCACCAAC GATACGGGAG CAAGCGATAA |
| 1251 | CTTACGTATC AATGAGGTCA GTGCAAATCA AAAGCTCTCG GGATCTATAG |
| 1301 | TATTTTCTGG AGAGAGATTG TCGACAGCAG AAGCTATAGC TGAAAATCTT |
| 1351 | ACTTCGAGGA TCAACCAGCC TGTCACTTTA GTAGAGGGGA GCTTAGTACT |
| 1401 | TAAACAGGGA GTGACCTTGA TCACACAAGG ATTCTCGCAG GAGCCAGAAT |
| 1451 | CCACGCTTCT TTTGGATCTG GGGACCTCAT TATAA |

[0730] The PSORT algorithm predicts outer membrane (0.935).

[0731] The protein was expressed in E. coli and purified as a GST-fusion product (FIG. 67A). The recombinant protein was used to immunise mice, whose sera were used in a Western blot (FIG. 67B) and for FACS analysis.

[0732] These experiments show that cp0018 is a surface-exposed and immunoaccessible protein, and that it is a useful immunogen. These properties are not evident from the sequence alone.

### Example 68

[0733] The following C. pneumoniae protein (PID 4376262) was expressed <SEQ ID 135; cp6262>:

| | |
|---|---|
| 1 | MRKLRILAIV LIALSIILIA GGVVLLTVAI PGLSSVISSP AGMGACALGC |
| 51 | VMLALGIDVL LKKREVPIVL ASVTTTPGTG SPRSGISISG ADSTIRSLPT |
| 101 | YLLDEGHPQS MRKLRILAIV LIVFSIILIA SGVVLLTVAI PGLSSVISSP |
| 151 | AGMGACALGC VMLALGIDVL LKKREVPIVL ASVTTTPGTG SPRSGISISG |
| 201 | ADSTIRSLPT YPLDEGHPQS MRKLRILAIV LIVFSIILIA SGVVLLTVAI |
| 251 | PGLSSIISSP AEMGACALGC VMLALGIDVL LKKREVPIVV PAPIPEEVVI |
| 301 | DDIDEESIRL QQEAEAALAR LPEEMSAFEG YIKVVESHLE NMKSLPYDGH |
| 351 | GLEEKTKHQI RVVRBSLKAM VPEPLDIRRI FEEEEFFFLS ARKRLIDLAT |
| 401 | TLVERKILTE QLERNNLRKA FSYLYQDSIF KKIIDNFEKL AWKFMILSKS |
| 451 | ICRFTIIFEN HEHGVAKSLL HKNAVLLEKV IYRSLQKSYR DIGMSSAKMK |
| 501 | ILHGNPFFSL EDNKKTIMKE HAEMLESLSS YRKVFLALSD ENVVDTPSDP |
| 551 | KKWDLSGIPC RDALSEISRD EQWQKKAHLK HQESLYTQAR DRLTDQSSKE |
| 601 | NQKELEKAEQ EYISSWERVK KFEIERVQER IRAIQKLYFN ILEREEETTG |
| 651 | QETVTPTVQG TTASSDLTDI LGRIEVSSRE DNQNQESCVK VLRSHEVEMS |
| 701 | WEVKQEYGPK KKEFQDQMGS LERFFTEHIE ELEVLQKDYS KHLSYFKKVN |
| 751 | NKKEVQYAKF RLKVLESDLE GILAQTESAE SLLTQEELPI LATRGALEKA |
| 801 | VFKGSLCCAL ASKAKPYFEE DPRPQDSDTQ LRALTLRLQE AKASLEEEIK |
| 851 | RFSNLENDIA EERRLLKESK QTEERAGLGV LREIAVESTY DLRSLTNTWE |
| 901 | GTPESEKVYF SMYLNYYNEE KRRAKTRLVE MTQRYRDFKH ALEAMQFNEE |
| 951 | ALLQEELSIQ APSE* |

[0734] A predicted signal peptide is highlighted.

[0735] The cp6262 nucleotide sequence <SEQ ID 136> is:

| | |
|---|---|
| 1 | ATGAGGAAAC TTCGTATTCT TGCGATCGTT CTCATAGCTT TGAGCATTAT |
| 51 | TTTGATTGCA GGTGGTGTGG TATTGCTTAC TGTAGCGATC CCTGGATTAA |
| 101 | GTTCAGTCAT TTCTTCCCCG GCAGGGATGG GTGCCTGTGC TTTGGGATGT |
| 151 | GTGATGCTTG CTTTAGGGAT CGATGTTCTT CTGAAGAAAC GAGAAGTCCC |
| 201 | TATAGTTCTC GCATCTGTAA CTACGACACC AGGAACTGGC AGCCCTAGAA |
| 251 | GTGGTATTTC TATTTCAGGA GCTGATAGCA CCATACGTTC TCTTCCTACG |
| 301 | TATCTCTTGG ACGAGGGACA TCCACAATCC ATGAGGAAAC TTCGTATTCT |
| 351 | TGCGATCGTT CTCATAGTTT TTAGCATTAT TTTGATTGCA AGTGGTGTGG |
| 401 | TATTGCTTAC TGTAGCGATC CCTGGATTAA GTTCAGTCAT TTCTTCCCCG |
| 451 | GCAGGGATGG GTGCCTGTGC TTTGGGATGT GTGATGCTTG CTTTAGGGAT |
| 501 | CGATGTTCTT CTGAAGAAAC GAGAAGTCCC TATAGTTCTC GCATCTGTAA |
| 551 | CTACGACACC AGGAACTGGC AGCCCTAGAA GTGGTATTTC TATTTCAGGA |
| 601 | GCTGATAGCA CCATACGTTC TCTTCCTACG TATCCCTTGG ACGAGGGACA |
| 651 | TCCACAATCC ATGAGGAAAC TTCGTATTCT TGCGATCGTT CTCATAGTTT |
| 701 | TTAGCATTAT TTTGATTGCA AGTGGTGTGG TATTGCTTAC TGTAGCGATC |
| 751 | CCTGGATTAA GCTCGATCAT TTCTTCCCCA GCGGAGATGG GPGCTTGTGC |
| 801 | TTTGGGATGT GTGATGCTTG CTTTGGGGAT CGACGTTCTT CTGAAGAAAC |
| 851 | GAGAAGTCCC TATAGTAGTT CCCGCACCTA TTCCTGAAGA AGTCGTCATA |
| 901 | GATGATATAG ATGAAGAGAG TATACGGCTG CAGCAGGAAG CTGAAGCCGC |
| 951 | TTTAGCAAGA CTTCCTGAGG AGATGAGTGC ATTTGAAGGT TACATAAAAG |
| 1001 | TTGTCGAGAG TCATTTGGAG AACATGAAAA GCCTGCCTTA TGATGGTCAT |
| 1051 | GGGCTAGAAG AGAAAACGAA ACATCAGATA AGAGTCGTCA GATCTTCTTT |
| 1101 | GAAGGCTATG GTTCCAGAAT TTTTAGATAT CAGAAGAATT TTTGAAGAAG |
| 1151 | AAGAGTTCTT TTTTCTCTCA GCTCGCAAAC GACTTATAGA TTTAGCTACT |
| 1201 | ACTTTAGTAG AGAGAAAAAT TTAAACAGAG CAACTTGAGC GCAATAATTT |
| 1251 | AAGGAAAGCG TTTTCTTATT TATATCAGGA CTCAATTTTT AAAAAAATTA |
| 1301 | TTGATAACTT CGAGAAGTTA GCATGGAAAT TTATGATTTT GAGTAAATCA |
| 1351 | ATTTGTCGAT TTACAATTAT TTTTGAAAAT CATGAACATG GTGTAGCAAA |
| 1401 | GAGCCTGTTA CACAAGAATG CAGTGTTACT GGAGAAGGTA ATCTATAGGA |
| 1451 | GTTTGCAAAA AAGCTATAGA GATATAGGCA TGTCATCTGC AAAGATGAAA |
| 1501 | ATCTTGCACG GCAACCCTTT TTTCTCTTTG GAAGATAATA AAAAGACGAT |
| 1551 | AATGAAAGAA CACGCAGAGA TGCTTGAAAG TCTCAGTAGC TATAGGAAGG |
| 1601 | TATTTTTAGC TCTATCTGAT GAGAACGTTG TAGATACACC TAGCGATCCA |
| 1651 | AAGAAATGGG ATTTGTCAGG AATCCCCTGT AGGGACGCGT TGTCTGAGAT |
| 1701 | TTCTCGTGAT GAACAGTGGC AGAAGAAAGC ACATCTAAAG CATCAAGAGT |
| 1751 | CCCTCTATAC GCAAGCTAGG GATCGTTTAA CAGACCAGAG CTCTAAAGAA |
| 1801 | AATCAGAAAG AGTTAGAGAA AGCTGAACAA GAGTACATAT CTTCTTGGGA |
| 1851 | ACGGGTTAAA AAATTTGAGA TTGAGAGAGT ACAGGAGAGG ATACGGGCAA |
| 1901 | TTCAAAAGCT TTATCCTAAT ATCCTCGAGA GAGAAGAAGA AACCACAGGT |
| 1951 | CAGGAGACTG TGACTCCAAC TGTTCAAGGG ACGACGGCTT CATCCGATTT |
| 2001 | AACAGATATT TTAGGAAGAA TAGAGGTCTC CAGTAGGGAG GATAATCAGA |
| 2051 | ATCAAGAGTC TTGTGTAAAA GTCTTAAGAA GTCATGAGGT AGAAATGAGC |
| 2101 | TGGGAAGTCA AACAAGAGTA TGGCCCTAAG AAAAAAGAAT TTCAGGATCA |
| 2151 | AATGGGTTCT TTAGAGAGGT TTTTTACAGA GCATATTGAA GAGTTAGAAG |
| 2201 | TATTACAGAA GGACTACTCT AAACACTTGT CTTATTTTAA AAAAGTAAAC |
| 2251 | AATAAGAAAG AGGTTCAATA TGCGAAGTTT AGGTTGAAGG TTTTAGAGTC |
| 2301 | AGATTTAGAA GGGATTCTAG CTCAGACTGA GAGTGCTGAG AGTCTGTTAA |
| 2351 | CTCAAGAAGA ACTTCCGATT CTTGCAACTC GGGGAGCCTT AGAGAAAGCT |
| 2401 | GTTTTCAAAG GGAGTCTATG TTGCGCGCTA GCAAGCAAAG CAAAACCCTA |
| 2451 | TTTTGAAGAG GATCCCAGAT TCCAAGATTC TGATACGCAA TTGCGAGCTC |
| 2501 | TGACTCTAAG GTTACAGGAG GCTAAGGCAA GCCTGGAAGA AGAGATAAAG |
| 2551 | AGATTTTCAA ATCTTGAGAA CGATATTGCA GAGGAAAGAC GCCTTCTTAA |
| 2601 | AGAGAGCAAG CAGACGTTCG AAAGAGCAGG TTTAGGGGTT CTCCGAGAAA |
| 2651 | TTGCAGTCGA GTCTACTTAT GATTTGCGTT CCTTAACAAA TACATGGGAA |
| 2701 | GCGACCCCAG AGAGTGAGAA GGTCTATTTT AGCATGTATC TTAATTATTA |
| 2751 | CAACGAAGAG AAACGTAGGG CTAAAACAAG ATTGGTTGAA ATGACACAGA |
| 2801 | GGTATAGAGA TTTTAAAATG GCCTTGGAAG CTATGCAGTT TAATGAAGAA |
| 2851 | GCCCTTTTGC AAGAGGAACT CTCTATTCAA GCTCCCAGTG AATAA |

[0736] The PSORT algorithm predicts inner membrane (0.660).

[0737] The protein was expressed in E. coli and purified as a GST-fusion product (FIG. 68A). The recombinant protein was used to immunise mice, whose sera were used in a Western blot (FIG. 68B) and for FACS analysis.

[0738] These experiments show that cp6262 is a surface-exposed and immunoaccessible protein, and that it is a useful immunogen. These properties are not evident from the sequence alone.

### Example 69

[0739] The following C. pneumoniae protein (PID 4376269) was expressed <SEQ ID 137, cp6269>:

| | |
|---|---|
| 1 | MYQENLRLLE RLLYNSVQKS YADRLFSYEK TKMVHDTPLI PWEEDKEKCA |
| 51 | EAEKAFLEQQ KILLDYGKSI FWLNENDEIN LNDPWSWGLN TVRTRKVFQE |
| 101 | VDDSERWNHK VLIQKLEDDY EKLLEESSKE STEANKKLLS DLVDRLEDAK |
| 151 | TKFFLKKQEE VETRVKDLRA RYGGTVDPKQ DTEAKKKVEL EASLETFLDS |
| 201 | IESELVQCLE DQDIYWKEQD VKDLARTQEL EEQDIEAKRE EAAEDLRSLN |
| 251 | ERLKKSKTML DRAKWHIENA EDSITWWTSQ IEMKDMKARL KILKBDITSV |
| 301 | LPEIDEIETC LSLEELPLLT TRELLTKSYL KFKICSETLL KMTSVFENNI |
| 351 | YVQEYEVQLQ NLGFKLQGIS QRFGKKQDDF ANLEEQVALQ KKRLRELTQN |
| 401 | FEIQGFNFMK EDFKAAAKDL YIRSTAEQKM NFDVPCMELF RRYHEEVNKP |
| 451 | LLELMYNCAD SYRDAKKKLC SLRLDEKELL QKEIKKEEFY QKKQQRHADR |
| 501 | SRHTTYQKLR IAEELALELK KKI* |

[0740] The cp6269 nucleotide sequence <SEQ ID 138> is:

| | |
|---|---|
| 1 | ATGTACCAGG AGAATCTAAG ATTGTTGGAA AGGCTTCTTT ATAATAGTGT |
| 51 | TCAAAAGAGC TATGCGGATC GGCTGTTTC CTATGAAAAG ACAAAGATGG |
| 101 | TGCACGATAC TCCGCTGATT CCTTGGGAAG AGGATAAGGA AAAATGTGCT |
| 151 | GAAGCTGAGA AAGCTTTCTT AGAGCAACAG AAGATTCTCC TAGATTATGG |
| 201 | AAAATCTATC TTTTGGCTGA ATGAGAACGA TGAGATCAAT TTAAACGATC |
| 251 | CTTGGAGTTG GGGTCTTAAT ACGGTGAGGA CTAGGAAAGT ATTCCAAGAG |
| 301 | GTTGACGACA CTGAACGTTG GAATCATAAG GTACTCATTC AAAAACTCGA |
| 351 | GGACGATTAT GAGAAACTTC TAGAGGAAAG TTCAAAAGAG TCTACTGAAG |
| 401 | CAAATAAGAA GCTTTTATCT GACTTAGTAG ATCGTCTTGA AGATGCTAAG |
| 451 | ACAAAATTTT TCCTGAAGAA ACAGGAGGAG GTGGAGACTC GCGTTAAGGA |
| 501 | TCTTAGAGCT CGATATGGAG GCACAGTAGA TCCTAAGCAG GATACGGAAG |
| 551 | CTAAGAAGAA AGTCGAATTG GAGGCTAGCT TAGAAACCTT TTTAGATTCC |
| 601 | ATCGAATCAG AGCTAGTACA GTGTTTAGAA GATCAAGATA TATATTGGAA |
| 651 | AGAACAGGAT GTCAAAGATC TAGCACGTAC GCAAGAGCTC GAGGAACAAG |
| 701 | ATATTGAAGC GAAGAGGGAA GAAGCTGCCG AAGACCTAAG AAGTCTTAAT |
| 751 | GAGCGTTTAA AGAAGTCAAA AACTATGTTA GATAGGGCTA AATGGCATAT |
| 801 | TGAAAATGCT GAGGACAGTA TTACCTGGTG GACTAGTCAG ATAGAAATGA |
| 851 | AGGATATGAA AGCAAGACTG AAGATCTTAA AAGAAGATAT AACAAGTGTT |
| 901 | CTACCTGAAA TAGATOAGAT TGAAACGTGT TTAAGCTTAG AGGAGCTTCC |
| 951 | TTTGCTTACG ACCAGGGAAC TCTTAACTAA GTCCTACCTA AAGTTTAAGA |
| 1001 | TTTGTTCGGA AACACTATTA AAAATGACTT CTGTGTTTGA GAACAATATC |
| 1051 | TATGTTCAGG AGTACGAGGT TCAGCTGCAA AATCTAGGGT TTAAGTTACA |
| 1101 | AGGTATATCT CAGAGATTCG GAAAGAAACA AGACGATTTT GCGAATCTAG |
| 1151 | AGGAACAGGT TGCTTTGCAA AAGAAACGAC TCAGAGAGCT CACTCAGAAT |
| 1201 | TTTGAAATAC AAGGATTCAA TTTCATGAAA GAAGATTTTA AGGCAGCCGC |
| 1251 | TAAAGATCTT TATATAAGAA GTACAGCTGA ACAAAAGATG AACTTTGATG |
| 1301 | TGCCTTGCAT GGAGCTCTTC CGTAGGTATC ATGAGGAGGT CAACAAGCCG |
| 1351 | CTTCTTGAGT TGATGTACAA TTGTGCAGAC AGTTATAGAG ATGCTAAGAA |
| 1401 | AAAGCTTTGC TCTCTACGTC TTGATGAAAA AGAGTTATTA CAAAAAGAAA |
| 1451 | TCAAGAAAGA GGAATTTTAT CAAAAGAAAC AACAAAGGCA TGCAGATAGA |
| 1501 | TCACGTCATA CTACGTATCA AAAGCTACGA ATTGCTGAAG AGCTTGCTCT |
| 1551 | TGAGCTGAAG AAGAAAATCT AA |

[0741] The PSORT algorithm predicts cytoplasmic location (0.412).

[0742] The protein was expressed in E. coli and purified as a GST-fusion product (FIG. 69A). The recombinant protein was used to immunise mice, whose sera were used in a Western blot (FIG. 69B) and for FACS analysis.

[0743] These experiments show that cp6269 is a surface-exposed and immunoaccessible protein, and that it is a useful immunogen. These properties are not evident from the sequence alone.

### Example 70

[0744] The following C. pneumoniae protein (PID 4376270) was expressed <SEQ ID 139; cp6270>:

| | |
|---|---|
| 1 | MKIPLRFLLI SLVPTLSMSN LLGAATTEEL SASNSFDGTT STTSFSSKTS |
| 51 | SATDGTNYVF KDSVVIENVP KTGETQSTSC FKNDAAAGDL NFLGGGFSFT |
| 101 | FSNIDATTAS GAAIGSEAAN KTVTLSGFSA LSFLKSPAST VTNGLGAINV |
| 151 | KGNLSLLDND KVLIQDNFST GDGGAINCAG SLKIANNKSL SFIGNSSSTR |
| 201 | GGAIHTKNLT LSSGGETLFQ GNTAPTAAGK GGAIAIADSG TLSISGDSGD |
| 251 | IIFEGNTIGA TGTVSHSAID LGTSAKITAL RAAQGHTIYF YDPITVTGST |
| 301 | SVADALNINS PDTGDNKEYT GTIVFSGEKL TEAEAKDEKN RTSKLLQNVA |
| 351 | FKNGTVVLKG DVVLSANGFS QDANSKLIMD LGTSLVANTE SIELTNLEIN |
| 401 | IDSLRNGKKI KLSAATAQKD IRIDRPVVLA ISDESFYQNG FLNEDHSYDG |
| 451 | ILELDAGKDI VISADSRSID AVQSPYGYQG KWTINWSTDD KKATVSWAKQ |
| 501 | SFNPTAEQEA PLVPNLLWGS FIDVRSFQNF IELGTEGAPY EKRFWVAGIS |
| 551 | NVLHRSGREN QRKFRHVSGG AVVGASTRMP GGDTLSLGFA QLFARDKDYF |
| 601 | MNTNFAKTYA GSLRLQHDAS LYSVVSILLG EGGLREILLP YVSKTLPCSF |
| 651 | YGQLSYGHTD HRMKTESLPP PPPTLSTDHT SWGGYVWAGE LGTRVAVENT |
| 701 | SGRGFFQEYT PFVKVQAVYA RQDSFVELGA ISRDFSDSHL YNLAIPLGIK |
| 751 | LEKRFAEQYY HVVAMYSPDV CRSNPKCTTT LLSNQGSWKT KGSNLARQAG |
| 801 | IVQASGFRSL GAAAELFGNF GFEWRGSSRS YNVDAGSKIK F |

[0745] A predicted signal peptide is highlighted.

[0746] The cp6270 nucleotide sequence <SEQ ID 140> is:

| | |
|---|---|
| 1 | ATGAAGATTC CACTCCGCTT TTTATTGATA TCATTAGTAC CTACGCTTTC |
| 51 | TATGTCGAAT TTATTAGGAG CTGCTACTAC CGAAGAGTTA TCGGCTAGCA |
| 101 | ATAGCTTCGA TGGAACTACA TCAACAACAA GCTTTTCTAG TAAAACATCA |
| 151 | TCGGCThCAG ATGGCACCAA TTATGTTTTT AAAGATTCTG TAGTTATAGA |
| 201 | AAATGTACCC AAAACAGGGG AAACTCAGTC TACTAGTTGT TTTAAAAATG |
| 251 | ACGCTGCAGC TGGAGATCTA AATTTCTTAG GAGGGGGATT TTCTTTCACA |
| 301 | TTTAGCAATA TCGATGCAAC CACGGCTTCT GGAGCTGCTA TTGGAAGTGA |
| 351 | AGCAGCTAAT AAGACAGTCA CGTTATCAGG ATTTTCGGCA CTTTCTTTTC |
| 401 | TTAAATCCCC AGCAAGTACA GTGACTAATG GATTGGGAGC TATCAATGTT |
| 451 | AAAGGGAATT TAAGCCTATT GGATAATGAT AAGGTATTGA TTCAGGACAA |
| 501 | TTTCTCAACA GGAGATGGCG GAGCAATTAA TTGTGCAGGC TCCTTGAAGA |
| 551 | TCGCAAACAA TAAGTCCCTT TCTTTTATTG GAAATAGTTC TTCAACACGT |
| 601 | GGCGGAGCGA TTCATACCAA AAACCTCACA CTATCTTCTG GTGGGGAAAC |
| 651 | TCTATTTCAG GGGAATACAG CGCCTACGGC TGCTGGTAAA GGAGGTGCTA |
| 701 | TCGCGATTGC AGACTCTGGC ACCCTATCCA TTTCTGGAGA CAGTGGCGAC |
| 751 | ATTATCTTTG AAGGCAATAC GATAGGAGCT ACAGGAACCG TCTCTCATAG |
| 801 | TGCTATTGAT TTAGGAACTA GCGCTAAGAT AACTGCGTTA CGTGCTGCGC |
| 851 | AAGGACATAC GATATACTTT TATGATCCGA TTACTGTAAC AGGATCGACA |
| 901 | TCTGTTGCTG ATGCTCTCAA TATTAATAGC CCTGATACTG GAGATAACAA |
| 951 | AGAGTATACG GGAACCATAG TCTTTTCTGG AGAGAAGCTC ACGGAGGCAG |
| 1001 | AAGCTAAAGA TGAGAAGAAC CGCACTTCTA AATTACTTCA AAATGTTGCT |
| 1051 | TTTAAAAATG GGACTGTAGT TTTAAAAGGT GATGTCCTTT TAAGTGCGAA |
| 1101 | CGGTTTCTCT CAGGATGCAA ACTCTAAGTT GATTATGGAT TTAGGGACGT |
| 1151 | CGTTGGTTGC AAACACCGAA AGTATCGAGT TAACGAATTT GGAAATTAAT |
| 1201 | ATAGACTCTC TCAGGAACGG GAAAAAGATA AAACTCAGTG CTGCCACAGC |
| 1251 | TCAGAAAGAT ATTCGTATAG ATCGTCCTGT TGTACTGGCA ATTAGCGATG |
| 1301 | AGAGTTTTTA TCAAAATGGC TTTTTGAATG AGGACCATTC CTATGATGGG |
| 1351 | ATTCTTGAGT TAGATGCTGG GAAAGACATC GTGATTTCTG CAGATTCTCG |
| 1401 | CAGTATAGAT GCTGTACAAT CTCCGTATGG CTATCAGGGA AAGTGGACGA |
| 1451 | TCAATTGGTC TACTGATGAT AAGAAAGCTA CGGTTTCTTG GGCGAAGCAG |
| 1501 | AGTTTTAATC CCACTGCTGA GCAGGAGGCT CCGTTAGTTC CTAATCTTCT |
| 1551 | TTGGGGTTCT TTTATAGATG TTCGTTCCTT CCAGAATTTT ATAGAGCTAG |
| 1601 | GTACTGAAGG TGCTCCTTAC GAAAAGAGAT TTTGGGTTGC AGGCATTTCC |
| 1651 | AATGTTTTGC ATAGGAGCGG TCGTGAAAAT CAAAGGAAAT TCCGTCATGT |
| 1701 | GAGTGGAGGT GCTGTAGTAG GTCCTAGCAC GAGGATGCCG GGTGGTGATA |
| 1751 | CCTTGTCTCT GGGTTTTGCT CAGCTCTTTG CGCGTGACAA AGACTACTTT |
| 1801 | ATGAATACCA ATTTCGCAAA GACCTACGCA GGATCTTTAC CTTTGCAGCA |
| 1851 | CGATGCTTCC CTATACTCTG TGGTGAGTAT CCTTTTAGGA GAGGGAGGAC |
| 1901 | TCCGCGAGAT CCTGTTGCCT TATGTTTCCA AGACTCTGCC GTGCTCTTTC |
| 1951 | TATGGGCAGC TTAGCTACGG CCATACGGAT CATCGCATGA AGACCGAGTC |
| 2001 | TCTACCCCCC CCCCCCCCGA CGCTCTCGAC GGATCATACT TCTTGGGGAG |
| 2051 | GATATGTCTG GGCTGGAGAG CTGGGAACTC GAGTTGCTGT TGAAAATACC |
| 2101 | AGCGGCAGAG GATTTTTCCA AGAGTACACT CCATTTGTAA AAGTCCAAGC |
| 2151 | TGTTTACGCT CGCCAAGATA GCTTTGTAGA ACTAGGAGCT ATCAGTCGTG |
| 2201 | ATTTTAGTGA TTCGCATCTT TATAACCTTG CGATTCCTCT TGGAATCAAG |
| 2251 | TTAGAGAAAC GGTTTGCAGA GCAATATTAT CATGTTGTAG CGATGTATTC |
| 2301 | TCCAGATGTT TGTCGTAGTA ACCCCAAATG TACGACTACC CTACTTTCCA |
| 2351 | ACCAAGGGAG TTGGAAGACC AAAGGTTCGA ACTTAGCAAG ACAGGCTGGT |
| 2401 | ATTGTTCAGG CCTCAGGTTT TCGATCTTTG GGAGCTGCAG CAGAGCTTTT |
| 2451 | CGGGAACTTT GGCTTTGAAT GGCGGGGAAT GGCGGGGATC TTCTCGTAGC |
| 2501 | ATGCGGGTAG CAAAATCAAA TTTTAG |

[0747] The PSORT algorithm predicts outer membrane (0.92).

[0748] The protein was expressed in E. coli and purified as a GST-fusion product (FIG. 70A). The recombinant protein was used to immunise mice, whose sera were used in a Western blot and for FACS analysis (FIG. 70B).

[0749] The cp6270 protein was also identified in the 2D-PAGE experiment (Cpn0013).

[0750] These experiments show that cp6270 is a surface-exposed and immunoaccessible protein, and that it is a useful immunogen. These properties are not evident from the sequence alone.

### Example 71

[0751] The following C. pneumoniae protein (PID 4376402) was expressed <SEQ ID 141; cp6402>:

| | |
|---|---|
| 1 | MNVADLLSHL ETLLSSKIFQ DYGPNGLQVG DPQTPVKKIA VAVTADLETI |
| 51 | KQAVAAEANV LIVHHGIFWK GMPYPITGMI HKRIQLLIEH NIQLIAYHLP |
| 101 | LDAHPTLGNN WRVALDLNWH DLKPFGSSLP YLGVQGSFSP IDIDSFIDLL |
| 151 | SQYYQAPLKG SALGGPSRVS SAALISGGAY RELSSAATSQ VDCFITGNFD |
| 201 | EPAWSTALES NINFLAFGHT ATEKVGPKSL AEHLKSEFPI STTFIDTANP |
| 251 | F |

[0752] The cp6402 nucleotide sequence <SEQ ID 142> is:

| | |
|---|---|
| 1 | ATGAATGTTG CGGAPCTCCT TTCTCATCTT GAGACTCTTC TCTCATCAAA |
| 51 | AATATTTCAG GATTATGGAC CCAACGGACT TCAAGTTGGA GATCCCCAAA |
| 101 | CTCCGGTAAA GAAAATCGCT GTTGCAGTTA CCGCAGATCT AGAAACCATA |
| 151 | AAACAAGCTG TTGCGGCCGA AGCAAACGTT CTCATTGTAC ACCACGGAAT |
| 201 | TTTTTGGAAA GGTATGCCCT ATCCTATTAC CGGCATGATC CATAAGCGCA |
| 251 | TCCAATTACT AATAGAACAC AATATCCAAC TCATTGCCTA CCACCTTCCT |
| 301 | TTGGATGCTC ACCCTACCTT AGGAAATAAC TGGAGAGTTG CCCTGGATCT |
| 351 | AAATTGGCAT GACTTGAAGC CCTTTGGTTC TTCCCTCCCT TATTTAGGAG |
| 401 | TGCAAGGCTC TTTCTCTCCT ATCGATATAG ATTCTTTCAT TGACCTGTTA |
| 451 | TCTCAATATT ACCAAGCTCC CCTAAAAGGA TCTGCCTTGG GCGGCCCCTC |
| 501 | TAGAGTCTCC TCAGCAGCTC TGATCTCAGG AGGAGCTTAT AGAGAACTCT |
| 551 | CTTCGGCAGC CACGTCCCAA GTCGATTGCT TCATCACAGG AAATTTTGAT |
| 601 | GAACCTGCAT GGTCGACAGC TCTAGAAAGC AATATCAACT TCCTAGCATT |
| 651 | TGGACATACA GCCACAGAAA AAGTAGGTCC AAAATCTCTT GCAGAGCATC |
| 701 | TAAAAAGCGA ATTTCCTATT TCCACAACCT TTATAGATAC GGCCAACCCC |
| 751 | TTCTAA |

[0753] The PSORT algorithm predicts cytoplasmic (0.158).

[0754] The protein was expressed in E. coli and purified as a GST-fusion product (FIG. 71A). The recombinant protein was used to immunise mice, whose sera were used in a Western blot (FIG. 71B) and for FACS analysis.

[0755] These experiments show that cp6402 is a surface-exposed and immunoaccessible protein, and that it is a useful immunogen. These properties are not evident from the sequence alone.

### Example 72

[0756] The following C. pneumoniae protein (PID 4376520) was expressed <SEQ ID 143; cp6520>:

| | |
|---|---|
| 1 | MKHYLSFSPS ADFFSKQGAI ETQVLFGERV LVKGSTCYAY SQLFHNELLW |
| 51 | KPYPGHSFRS TLVPCTPEFH IHPNVSVVSV DAFLDPWGIP LPFGTLLHVN |
| 101 | SQNTVIFPKD ILNHMNTIWG SGTPQCDPRH LRRLNYNFFA ELLIKDADLL |
| 151 | LNFPYVWGGR SVHESLEKPG VDCSGFINIL YQAQGYNVPR NAADQYADCH |
| 201 | WISSFENLPS GGLIFLYPKE EKRISHVMLK QDSSTLIHAS GGGKKVEYFI |
| 251 | LEQDGKFLDS TYLFFRNNQR GRAFFGIPRK RKAPL* |

[0757] The cp6520 nucleotide sequence <SEQ ID 144> is:

| | |
|---|---|
| 1 | ATGAAACAGT ACCTATCATT TTCTCCTTCT GCTGATTTTT TCTCTAAACA |
| 51 | GGGTGCTATT GAAACTCAAG TCCTTTTTGG AGAGCGCGTC TTAGTCAAAG |
| 101 | GGAGCACCTG CTATGCATAT TCCCAATTAT TCCACAATGA GCTGTTATGG |
| 151 | AAGCCCTATC CAGGTCATAG CTTTCGTTCT ACCCTAGTCC CCTGCACTCC |
| 201 | TGAATTTCAT ATCCATCCAA ATGTTTCTGT GGTTTCTGTG GATGCATTTT |
| 251 | TAGATCCTTG GGGGATCCCT CTTCCTTTTG GAACTTTACT CCATGTGAAT |
| 301 | TCTCAAAATA CCGTTATTTT CCCTAAGGAT ATTCTCAATC ATATGAACAC |
| 351 | CATCTGGGGC TCCGGCACAC CTCAATGCGA TCCTAGACAT CTACGTCGTC |
| 401 | TAAATTATTA CTTCTTTGCT GAACTTTTAA TTAAAGACGC AGACCTTTTA |
| 451 | CTGAACTTTC CCTATGTATG GGGAGGACGG TCTGTACACG AAAGTCTGGA |
| 501 | AAAGCCGGGT GTTGATTGTT CGGGATTTAT CAATATCCTT TACCAGGCAC |
| 551 | AGGGATACAA CGTCCCTAGA AACGCTGCAG ATCAATATGC GGATTGTCAT |
| 601 | TGGATCTCTA GCTTTGAGAA CCTTCCTTCT GGTGGGTTAA TATTTCTTTA |
| 651 | CCCTAAAGAA GAAAAGCGTA TTTCTCATGT TATGTTGAAA CAGGATAGTT |
| 701 | CCACCCTCAT TCATGCTTCT GGTGGAGGGA AAAAAGTGGA GTATTTCATT |
| 751 | TTAGAACAAG ATGGGAAGTT TTTAGATTCG ACTTATCTAT TTTTTAGAAA |
| 801 | TAATCAGAGG GGACGGGCAT TTTTTGGGAT CCCTAGAAAA AGAAAAGCCT |
| 851 | TTCTGTAA |

[0758] The PSORT algorithm predicts cytoplasmic (0.265).

[0759] The protein was expressed in E. coli and purified as a GST-fusion product (FIG. 72A). The recombinant protein was used to immunise mice, whose sera were used in a Western blot (FIG. 72B) and for FACS analysis.

[0760] These experiments show that cp6520 is a surface-exposed and immunoaccessible protein, and that it is a useful immunogen. These properties are not evident from the sequence alone.

### Example 73

[0761] The following C. pneumoniae protein (PID 4376567) was expressed <SEQ ID 145; cp6567>:

| | |
|---|---|
| 1 | MTSPIPFQSS GDASFLAEQP QQLPSTSESQ LVTQLLTMMK HTQALSETVL |
| 51 | QQQRDRLPTA SIILQVGGAP TGGAGAPFQP GPADDHHHPI PPPVVPAQIE |
| 101 | TEITTIRSEL QLMRSTLQQS TKGARTGVLV VTAILMTISL LAIIIIILAV |
| 151 | LGFTGVLPQV ALLMQGETNL IWAMVSGSII CFIALIGTLG LILTNKNTPL |

[0762] The cp6567 nucleotide sequence <SEQ ID 146> is:

| | |
|---|---|
| 1 | ATGACCTCAC CGATCCCCTT TCAGTCTAGT GGCGATGCCT CTTTCCTTGC |
| 51 | CGAGCAGCCA CAGCAACTCC CGTCTACTTC TGAATCTCAG CTAGTAACTC |
| 101 | AATTGCTAAC CATGATGAAG CATACTCAAG CATTATCCGA AACGGTTCTT |
| 151 | CAACAACAAC GCGATCGATT ACCAACCGCA TCTATTATCC TTCAAGTAGG |
| 201 | AGGAGCTCCT ACAGGAGGAG CGGGTGCGCC TTTTCAACCA GGACCGGCAG |
| 251 | ATGATCATCA TCATCCCATA CCGCCGCCTG TTGTACCAGC TCAAATAGAA |
| 301 | ACAGAAATCA CCACTATAAG ATCCGAGTTA CAGCTCATGC GATCTACTCT |
| 351 | ACAACAAAGC ACAAAAGGAG CTCGTACAGG AGTTCTAGTG GTTACTGCAA |
| 401 | TCTTAATGAC GATCTCCTTA TTGGCTATTA TTATCATAAT ACTAGCTGTG |
| 451 | CTTGGATTTA CGGGCGTCTT GCCTCAAGTA GCTTTATTGA TGCAGGGTGA |
| 501 | AACAAATCTG ATTTGGGCTA TGGTGAGCGG TTCTATTATT TGCTTTATTG |
| 551 | CGCTAATTGG AACTCTAGGA TTAATTTTAA CAAATAAGAA CACGCCTCTA |
| 601 | CCGGCTTCTT AA |

[0763] The PSORT algorithm predicts inner membrane (0.694).

[0764] The protein was expressed in E. coli and purified as a GST-fusion product (FIG. 73A). The recombinant protein was used to immunise mice, whose sera were used in a Western blot (FIG. 73B) and for FACS analysis.

[0765] These experiments show that cp6567 is a surface-exposed and immunoaccessible protein, and that it is a useful immunogen. These properties are not evident from the sequence alone.

### Example 74

[0766] The following C. pneumoniae protein (PID 4376576) was expressed <SEQ ID 147; cp6576>:

| | |
|---|---|
| 1 | MLIMRNKVIL QISILALIQT PLTLFSTEKV KEGHVVVDSI TIITEGENAS |
| 51 | NKHPLPKLKT RSGALFSQLD FDEDLRILAK EYDSVEPKVE FSEGKTNIAL |
| 101 | HLIAKPSIRN IHISGNQVVP EHKILKTLQI YRNDLFEREK FLKGLDDLRT |
| 151 | YYLKRGYFAS SVDYSLEHNQ EKGHIDVLIK INEGPCGKIK QLTFSGISRS |
| 201 | EKSDIQEFIQ TKQHSTTTSW FTGAGLYHPD IVEQDSLAIT NYLHNNGYAK |
| 251 | AIVNSHYDLD DKGNILLYKD IDRGSRYTLG HVHIQGFEVL PKRLIEKQSQ |
| 301 | VGPNDLYCPD KIWDGAHKIK QTYAKYGYIN TNVDVLFIPH ATRPIYDVTY |
| 351 | EVSEGSPYKV GLIKITGNTH TKSDVILHET SLFPGDTFNR LKLEDTEQRL |
| 401 | RNTGYFQSVS VYTVRSQLDP MGNADQYRDI FVEVKETTTG NLGLFLGFSS |
| 451 | LDNLFGGIEL SESNFDLFGA RNIFSKGFRC LRGGGEHLFL KANFGDKVTD |
| 501 | YTLKWTKPHF LNTPWILGIE LDKSINRALS KDYAVQTYGG NVSTTYILNE |
| 551 | HLKYGLFYRG SQTSLHEKRK FLLGPNIDSN KGFVSAAGVN LNYDSVDSPR |
| 601 | TPTTGIRGGV TFEVSGLGGT YHFTKLSLNS SIYRKLTRKG ILKIKGEAQF |
| 651 | IKPYSNTTAE GVPVSERFFL GGETTVRGYK SFIIGPKYSA TEPQGGLSSL |
| 701 | LISEEFQYPL IRQPNISAFV FLDSGFVGLQ EYKISLKDLR SSAGFGLRFD |
| 751 | VMNNVPVMLG FGWPFRPTET LNGEKIDVSQ RFFFALGGMF * |

[0767] A predicted signal peptide is highlighted.

[0768] The cp6576 nucleotide sequence <SEQ ID 148> is:

| | |
|---|---|
| 1 | ATGCTCATCA TGCGAAATAA AGTTATCTTG CAAATATCTA TTCTAGCGTT |
| 51 | AATCCAAACC CCTTTAACTT TATTTTCTAC TGAAAAAGTT AAAGAAGGCC |
| 101 | ATGTGGTGGT AGACTCTATC ACAATCATAA CGGAAGGAGA AAATGCTTCA |
| 151 | AATAAACATC CCTTACCCAA ATTAAAGACC AGAAGTGGGG CTCTTTTTTC |
| 201 | TCAATTAGAT TTTGATGAAG ACTTGAGAAT TCTAGCTAAA GAATACGACT |
| 251 | CTGTTGAGCC TAAAGTAGAA TTTTCTGAAG GGAAAACTAA CATAGCCCTT |
| 301 | CACCTAATAG CTAAACCCTC AATTCGAAAT ATTCATATCT CAGGAAATCA |
| 351 | AGTCGTTCCT GAACATAAAA TTCTTAAAAC CCTACAAATT TACCGTAATG |
| 401 | ATCTCTTTGA ACGAGAAAAA TTTCTTAAGG GTCTTGATGA TCTAAGAACG |
| 451 | TATTATCTCA AGCGAGGATA TTTCGCATCC AGTGTAGACT ACAGTCTGGA |
| 501 | ACACAATCAA GAAAAAGGTC ACATCGATGT TTTAATTAAA ATCAATGAAG |
| 551 | GTCCTTGCGG GAAAATTAAA CAGCTTACGT TCTCAGGAAT CTCTCGATCA |
| 601 | GAAAAATCAG ATATCCAAGA ATTTATTCAA ACCAAGCAGC ACTCTACAAC |
| 651 | TACAAGTTGG TTTACTGGAG CTGGACTCTA TCACCCAGAT ATTGTTGAAC |
| 701 | AAGATAGCTT GGCAATTACG AATTACCTAC ATAATAACGG GTACGCTGAT |
| 751 | GCTATAGTCA ACTCTCACTA TGACCTTGAC GACAAAGGGA ATATTCTTCT |
| 801 | TTACATGGAT ATPGATCGAG GGTCGCGATA TACCTTAGGA CACGTCCATA |
| 851 | TCCAAGGGTT TGAGGTTTTG CCAAAACGCC TTATAGAAAA GCAATCCCAA |
| 901 | GTCGGCCCCA ATGATCTTTA TTGCCCCGAT AAAATATGGG APGGGGCTCA |
| 951 | TAAGATCAAA CAAACTTATG CAAAGTATGG CTACATCAAT ACCAATGTAG |
| 1001 | ACGTTCTCTT CATCCCTCAC GCAACCCGCC CTATTTATGA TGTAACTTAT |
| 1051 | GAGGTAAGTG AAGGGTCTCC TTATAAAGTT GGGTTAATTA AAATTACTGG |
| 1101 | GAATACCCAT ACAAAATCTG ACGTTATTTT ACACGAAACC AGTCTCTTCC |
| 1151 | CAGGAGATAC ATTCAATCGC TTAAAGCTAG AAGATACTGA GCAACGTTTA |
| 1201 | AGAAATACAG GCTACTTCCA AAGCGTTAGT GTCTATACAG TTCGTTCTCA |
| 1251 | ACTTGATCCT ATGGGCAATG CGGATCAATA CCGAGATATT TTTGTAGAAG |
| 1301 | TCAAAGAAAC AACAACAGGA AACTTAGGCT TATTCTTAGG ATTTAGTTCT |
| 1351 | CTTGACAATC TTTTTGGAGG AATTGAACTA TCTGAAAGTA ATTTTGATCT |
| 1401 | ATTTGGAGCT AGAAATATAT TTTCTAAAGG TTTTCGTTGT CTAAGAGGCG |
| 1451 | GTGGAGAACA TCTATTCTTA AAAGCCAACT TCGGGGACAA AGTCACAGAC |
| 1501 | TATACTTTGA AGTGGACCAA ACCTCATTTT CTAAACACTC CTTGGATTTT |
| 1551 | AGGAATTGAA TTAGATAAAT CAATTAACAG AGCATTATCT AAAGATTATG |
| 1601 | CTGTCCAAAC CTATGGCGGG AACGTCAGCA CAACGTATAT CTTGAACGAA |
| 1651 | CACCTGAAAT ACGGTCTATT TTATCGAGGA AGTCAAACGA GTTTACATGA |
| 1701 | AAAACGTAAG TTCCTCCTAG GGCCAAATAT AGACAGCAAT AAAGGATTTG |
| 1751 | TCTCTGCTGC AGGTGTCAAC TTGAATTACG ATTCTGTAGA TAGTCCTAGA |
| 1801 | ACTCCAACTA CAGGGATTCG CGGGGGGGTG ACTTTTGAGG TTTCTGGTTT |
| 1851 | GGGAGGAACT TATCATTTTA CAAAACTCTC TTTAAACAGC TCTATCTATA |
| 1901 | GAAAACTTAC GCGTAAAGGT ATTTTGAAAA TCAAAGGCGA AGCTCAATTT |
| 1951 | ATTAAACCCT ATAGCAATAC TACAGCTGAA GGAGTTCCTG TCAGTGAGCG |
| 2001 | CTTCTTCCTA GGTGGAGAGA CTACAGTTCG GGGATATAAA TCCTTTATTA |
| 2051 | TCGGTCCAAA ATACTCTGCT ACAGAACCTC AGGGAGGACT CTCTTCGCTC |
| 2101 | CTTATTTCAG AAGAGTTTCA ATACCCTCTC ATCAGACAAC CTAATATTAG |
| 2151 | TGCCTTTGTA TTCTTAGACT CAGGTTTTGT CGGTTTACAA GAGTATAAGA |
| 2201 | TTTCGTTAAA AGATCTACGT AGTAGTGCTG GATTTGGTCT GCGCTTCGAT |
| 2251 | GTAATGAATA ATGTTCCTGT TATGTTAGGA TTTGGTTGGC CCTTCCGTCC |
| 2301 | AACCGAGACT TTGAATGGAG AAAAAATTGA TGTATCTCAG CGATPCTTCT |
| 2351 | TTGCTTTAGG GGGCATGTTC TAA |

[0769] The PSORT algorithm predicts outer membrane (0.7658).

[0770] The protein was expressed in E. coli and purified as GST-fusion (FIG. 74A), his-tag and his-tag/GST-fusion products. The recombinant proteins were used to immunise mice, whose sera were used in a Western blot (FIG. 74B) and for FACS analysis (FIG. 74C).

[0771] The cp6576 protein was also identified in the 2D-PAGE experiment (Cpn0300).

[0772] These experiments show that cp6576 is a surface-exposed and immunoaccessible protein, and that it is a useful immunogen. These properties are not evident from the sequence alone.

### Example 75

[0773] The following C. pneumoniae protein (PID 4376607) was expressed <SEQ ID 149; cp6607>:

| | |
|---|---|
| 1 | MNKRQKDLK ICVIISTLIL VGIFARAPRG DTFKTFLKSE |
| | EAIIYSNQCN |
| 51 | EDMRKILCDA IEHADEEIFL RIYNLSEPKI QQSLTRQAQA |
| | KNKVTIYYQK |
| 101 | FKIPQILKQA SNVTLVEQPP AGRKLMHQKA LSIDKKDAWL |
| | GSANYTNLSL |
| 151 | RLDNNLILGM HSSELCDLII TNTSGDFSIK DQTGKYFVLP |
| | QDRKIAIQAV |
| 201 | LEKIQTAQKT IQVAMFALTH SEIIQALHQA KQRGIHVDII |
| | IDRSHSKLTF |
| 251 | KQLRQLNINK DFVSINTAPC TLHHKFAVID NKTLLAGSIN |
| | WSKGRFSLND |
| 301 | ESLIILENLT KQQNQKLRNI WRDLAXHSEH PTVDDEEKEI |
| | IEKSLPVEEQ |
| 351 | EAA* |

[0774] A predicted signal peptide is highlighted.

[0775] The cp6607 nucleotide sequence <SEQ ID 150> is:

| | |
|---|---|
| 1 | ATGAATAAAA GACAAAAAGA TAAATTAAAA ATCTGTGTTA |
| | TTATTACCAC |
| 51 | GTTGATTTTA GTAGGAATTT TTGCAAGAGC TCCTCGTGGT |
| | GACACTTTTA |
| 101 | AGACTTTTTT AAAGTCTGAA GAAGCTATCA TCTACTCAAA |
| | TCAATGCAAT |
| 151 | GAGCACATGC GTAAAATTCT ATGCCATGCA ATAGAACACC |
| | CTGATCAAGA |
| 201 | GATCTTCCTA CGTATTTATA ACCTCTCAGA ACCCAAGATC |
| | CAACAGAGTT |
| 251 | TAACTCGACA AGCTCAAGCA AAAAACAAAG TTACGATCTA |
| | CTATCAAAAA |
| 301 | TTTAAAATTC CCCAAATCTT AAAGCAAGCC AGCAATGTAA |
| | CTTTAGTCGA |
| 351 | GCAACCTCCA GCAGGGCGTA AACTGATGCA TCAAAAAGCT |
| | CTTTCCATAG |
| 401 | ATAAGAAAGA TGCTTGGCTA GGATCTGCGA ACTACACCAA |
| | TCTTTTTCTA |
| 451 | CGTTTAGATA ATAATCTCAT TCTAGGAATG CATAGCTCGG |
| | AGCTCTGTGA |
| 501 | TCTCATTATC ACAAATACCT CTGGAGACTT TTCTATAAAG |
| | GATCAAACAG |
| 551 | GAAAGTATTT TGTTCTTCCT CAAGATCGTA AAATTGCAAT |
| | ACAAGCTGTA |
| 601 | CTCGAAAAAA TCCAGACAGC TCAGAAAACC ATCCAAGTTG |
| | CTATGTTTGC |
| 651 | TCTGACCCAC TCGGAGATTA TTCAAGCCTT ACATCAAGCA |
| | AAACAACGAG |
| 701 | GAATCCATGT AGATATTATC ATTGATAGAA GTCATAGCAA |
| | ACTTACTTTT |
| 751 | AAGCAATTAC GACAATTAAA TATCAATAAA GACTTTGTTT |
| | CTATAAATAC |
| 801 | CGCACCCTGT ACTCTTCACC ATAAGTTTGC AGTTATAGAT |
| | AATAAAACTC |
| 851 | TACTTGCAGG ATCTATAAAT TGGTCTAAAG GAAGATTCTC |
| | CTTAAATGAT |
| 901 | GAAAGCTTGA TCATACTGGA AAACCTGACC AAACAACAAA |
| | ATCAGAAACT |
| 951 | TCGAATGATT TGGAAAGATC TAGCTAAGCA TTCAGAACAT |
| | CCTACAGTAG |
| 1001 | ACGATGAAGA AAAAGAAATT ATAGAAAAAA GTCTTCCAGT |
| | AGAAGAGCAA |
| 1051 | GAAGCAGCGT GA |

[0776] The PSORT algorithm predicts periplasmic (0.934).

[0777] The protein was expressed in E. coli and purified as a his-tagged product (FIG. 75A) and also as a GST-fusion. The GST-fusion protein was used to immunise mice, whose sera were used in a Western blot (FIG. 75B) and for FACS analysis.

[0778] These experiments show that cp6607 is a surface-exposed and immunoaccessible protein, and that it is a useful immunogen. These properties are not evident from the sequence alone.

### Example 76

[0779] The following C. pneumoniae protein (PID 4376624) was expressed <SEQ ID 151; cp6624>:

| | |
|---|---|
| 1 | MDAKMGYIFK VMRWIFCFVA CGITFGCTNS GFQNANSRPC |
| | ILSMNRMIHD |
| 51 | CVBRVVGNRL ATAVLIKGSL DPHAYEMVKG DKDRIAGSAV |
| | IFCNGLGLEH |
| 101 | TLSLREHLEN NPNSVKLGER LIARGAFVPL EEDGICDPUI |
| | WMDLSIWKEA |
| 151 | VIEITEVLIE KFPEWSAEFK ANSEELVCEM SILDSWAIQC |
| | LSTIPBNLRY |
| 201 | LVSGHNAFSY FTRRYLATPE EVASGAWRSR CISPEGLSPE |
| | AQISVRDIMA |
| 251 | VVDYINEHDV SVVFPEDTLN QDALKKIVSS LKKSHLVRLA |
| | QKPLYSDNVD |
| 301 | DNYFSTFKHN VCLITEELGG VALECQR* |

[0780] The cp6624 nucleotide sequence <SEQ ID 152> is:

| | |
|---|---|
| 1 | ATGGATGCGA AAATGGGATA TATATTTAAA GTGATGCGTT |
| | GGATTTTCTG |
| 51 | TTTCGTGGCA TGTGGTATAA CTTTTGGATG TACCAATTCT |
| | GGGTTTCAGA |
| 101 | ATGCAAATTC ACGTCCTTGT ATACTATCCA TGAATCGCAT |
| | GATTCATGAT |
| 151 | TGTGTTGAAA GAGTCGTGGG GAATAGGCTT GCTACCGCTG |
| | TTTTGATCAA |
| 201 | AGGATCCTTA GACCCTCATG CGTATGAGAT GGTTAAAGGG |
| | GATAAGGACA |
| 251 | AGATTGCTGG AAGTGCCGTA ATTTTTTGTA ACGGCCTGGG |
| | TCTTGAGCAT |
| 301 | ACATTAAGTT TGCGGAAGCA TTTAGAAAAT AATCCCAATA |
| | GTGTCAAGTT |
| 351 | AGGGGAGCGG TTCATAGCGC GTGGGGCCTT TGTTCCTCTA |
| | GAAGAAGACG |
| 401 | GTATTTGCGA TCCTCATATC TGGATGGATC TTTCTATTTG |
| | GAAGGAAGCT |
| 451 | GTCATAGAAA TTACAGAAGT TCTCATTGAA AAGTTCCCTG |
| | AATGGTCTGC |
| 501 | TGAATTTAAA GCAAATAGTG AGGAACTTGT TTGTGAAATG |
| | TCTATTTTAG |
| 551 | ATTCTTGGGC GAAACAATGC TTGAGCACAA TTCCTGAAAA |
| | TTTACGGTAT |
| 601 | CTTGTCTCAG GTCATAATGC GTTCAGTTAC TTTACACGTC |
| | GCTATTTAGC |
| 651 | TACTCCTGAA GAAGTGGCTT CCGGAGCATG GAGGTCTCGT |
| | TATATGGCTC |
| 701 | CTGAGGGTCT ATCTCCAGAA GCTCAAATCA GTGTTCGTGA |
| | TATTATGGCG |
| 751 | GTTGTAGATT ATATTAATGA GCATGATGTC AGTGTGGTTT |
| | TCCCTGAGGA |
| 801 | TACTCTGAAC CAAGATGCGT TGAAAAAAAT TGTTTCTTCT |
| | CTGAAGAAAA |
| 851 | GTCATTTAGT TCGTCTAGCT CAAAAACCAT TGTATAGTGA |
| | TAATGTGGAC |
| 901 | GACAATTATT TTAGCACCTT TAAACATAAT GTCTGCCTTA |
| | TCACAGAAGA |
| 951 | ATTAGGAGGG GTGGCTCTTG AATGTCAAAG ATGA |

[0781] The PSORT algorithm predicts inner membrane (0.168).

[0782] The protein was expressed in E. coli and purified as a his-tag product (FIG. 76A). The recombinant protein was used to immunise mice, whose sera were used in a Western blot (FIG. 76B) and for FACS analysis.

[0783] The cp6624 protein was also identified in the 2D-PAGE experiment.

[0784] These experiments show that cp6624 is a surface-exposed and immunoaccessible protein, and that it is a useful immunogen. These properties are not evident from the sequence alone.

### Example 77

[0785] The following C. pneumoniae protein (PID 4376728) was expressed <SEQ ID 153; cp6728>:

| | |
|---|---|
| 1 | MKSSVSWLFF SSIPLFSSLS IVAAEVTLDS SNNSYDGSNG |
| | TTFTVFSTTD |
| 51 | AAAGTTYSLL SDVSFQNAGA LGIPLASGCF LEAGGDLTFQ |
| | GNQHALKFAF |
| 101 | INAGSSAGTV ASTSAADKNL LFNDFSRLSI ISCPSLLLSP |
| | TGQCALRSVG |
| 151 | NLSLTGNSQI IFTQNFSSDN GGVINTKNFL LSGTSQFASF |
| | SRNQAFTGKQ |
| 201 | GGVVYATGTI TIENSPGIVS FSQNLAKGSG GATYSTDNCS |
| | ITDNFQVIFD |
| 251 | GNSAWEAAQA QGGAICCTTT DKTVTLTGNK NLSPTNNTAL |
| | TYGGAISGLK |
| 301 | VSISAGGPTL FQSNISGSSA GQGGGGAINI ASAGELALSA |
| | TSGDITFNNN |
| 351 | QVTNGSTSTR NAINIIDTAK VTSIRAATGQ SIYFYDPITN |
| | PGTAASTDTL |
| 401 | NLNLADANSE IEYGGAIVFS GEKLSPTEKA IAANVTSTIR |
| | QPAVLARGDL |
| 451 | VLRDGVTVTF KDLTQSPGSR ILMDGGTTLS AKEANLSLNG |
| | LAVNLSSLDG |
| 501 | TNKAALKTEA ADKNISLSGT IALIDTEGSF YENHNLKSAS |
| | TYPLLELTTA |
| 551 | GANGTITLGA LSTLTLQEPE THYGYQGNWQ LSWANATSSK |
| | IGSINWTRTG |
| 601 | YIPSPERKSN LPLNSLWGNF IDIRSINQLI ETKSSGEPFE |
| | RELWLSGIAN |
| 651 | FFYRDSMPTR HGFRHISGGY ALGITATTPA EDQLTFAFCQ |
| | LEARDRNHIT |
| 701 | GKNHGDTYGA SLYFHHTEGL FDIANFLWGK ATRAPWVLSE |
| | ISQIIPLSPD |
| 751 | AKFSYLHTDN HMKTYYTDNS IIKGSWRNDA FCADLGASLP |
| | FVISVPYLLK |
| 801 | EVEPFVKVQY IYAHQQDFYE RHAEGRAPNK SELINVEIPI |
| | GVTFERDSKS |
| 851 | EKGTYDLTIM YILDAYRRNP KCQTSLIASD ANWMAYGTNL |
| | ARQGFSVRAA |
| 901 | NHFQVNPHME IFGQFAFEVR SSSRNYNTNL GSKPCF* |

[0786] The cp6728 nucleotide sequence <SEQ ID 154> is:

| | |
|---|---|
| 1 | ATGAAGTCCT CTGTCTCTTG GTTGTTCTTT TCTTCAATCC |
| | CGCTCTTTTC |
| 51 | ATCGCTCTCT ATAGTCGCGG CAGAGGTGAC CTTAGATAGC |
| | AGCAATAATA |
| 101 | GCTATGATGG ATCTAACGGA ACTACCTTCA CGGTCTTTTC |
| | CACTACGGAC |
| 151 | GCTGCTGCAG GAACTACCTA TTCCTTACTT TCCGACGTAT |
| | CCTTTCAAAA |
| 201 | TGCAGGGGCT TTAGGAATTC CCTTAGCCTC AGGATGCTTC |
| | CTAGAAGCGG |
| 251 | GCGGCGATCT TACTTTCCAA GGAAATCAAC ATGCACTGAA |
| | GTTTGCATTT |
| 301 | ATCAATGCGG GCTCTAGCGC TGGAACTGTA GCCAGTACCT |
| | CAGCAGCAGA |
| 351 | TAAGAATCTT CTCTTTAATG ATTTTTCTAG ACTCTCTATT |
| | ATCTCTTGTC |
| 401 | CCTCTCTTCT TCTCTCTCCT ACTGGACAAT GTGCTTTAAA |
| | ATCTGTGGGG |
| 451 | AATCTATCTC TAACTGGCAA TTCCCAAATT ATATTTACTC |
| | AGAACTTCTC |
| 501 | GTCAGATAAC GGCGGTGTTA TCAATACGAA AAACTTCTTA |
| | TTATCAGGGA |
| 551 | CATCTCAGTT TGCGAGCTTT TCGAGAAACC AAGCCTTCAC |
| | AGGGAAGCAA |
| 601 | GGCGGTGTAG TTTACGCTAC AGGAACTATA ACTATCGAGA |
| | ACAGCCCTGG |
| 651 | GATAGTTTCC TTCTCTCAAA ACCTAGCGAA AGGATCTGGC |
| | GGTGCTCTCT |
| 701 | ACAGCACTGA CAACTGTTCG ATTACAGATA ACTTTCAAGT |
| | GATCTTTGAC |
| 751 | GGCAATAGTG CTTGGGAAGC CGCTCAAGCT CAGGGCGGGG |
| | CTATTTGTTG |
| 801 | CACTACGACA GATAAAAGAG TGACTCTTAC TGGGAACAAA |
| | AACCTCTCTT |
| 851 | TCACAAATAA TACAGCATTG ACATATGGCG GAGCCATCTC |
| | TGGACTCAAG |
| 901 | GTCAGTATTT CCGCTGGAGG TCCTACTCTA TTTCAAAGTA |
| | ATATCTCAGG |
| 951 | AAGTAGCGCC GGTCAGGGAG GAGGAGGAGC GATCAATATA |
| | GCATCTGCTG |
| 1001 | GGGAACTCGC TCTCTCTGCT ACTTCTGGAG ATATTACCTT |
| | CAATAACAAC |
| 1051 | CAAGTCACCA ACGGAAGCAC AAGTACAAGA AACGCAATAA |
| | ATATCATTGA |
| 1101 | TACCGCTAAA GTCACATCGA TACGAGCTGC TACGGGGCAA |
| | TCTATCTATT |
| 1151 | TCTATGATCC CATCACAAAT CCAGGAACCG CAGCTTCTAC |
| | CGACACATTG |
| 1201 | AACTTAAACT TAGOAGATCC GAACAGTGAG ATCGAGTATG |
| | GGGGTGCGAT |
| 1251 | TGTCTTTTCT GGAGAAAAGC TTTCCCCTAC AGAAAAAGCA |
| | ATCGCTGCAA |
| 1301 | ACGTCACCTC TACTATCCGA CAACCTGCAG TATTAGCGCG |
| | GGGAGATCTT |
| 1351 | GTACTTCGTG ATGGAGTCAC CGTAACTTTC AAGGATCTGA |
| | CTCAAAGTCC |
| 1401 | AGGATCCCGC ATCTTAATGG ATGGGGGGAC TACACTTAGT |
| | GCTAAAGAGG |
| 1451 | CAAATCTTTC GCTTAATCGC TTAGCAGTAA ATCTCTCCTC |
| | TTTAGATGGA |
| 1501 | ACCAACAAGG CAGCTTTAAA AACAGAAGCT GCAGATAAAA |
| | ATATCAGCCT |
| 1551 | ATCGGGAACG ATTGCGCTTA TTGACACGGA AGGGTCATTC |
| | TATGAGAATC |
| 1601 | ATAACTTAAA AAGTGCTAGT ACCTATCCTC TTCTTGAACT |
| | TACCACCGCA |
| 1651 | GGAGCCAACG GAACGATTAC TCTGGGAGCT CTTTCTACCC |
| | TGACTCTTCA |
| 1701 | AGAACCTGAA ACCCACTACG GGTATCAAGG AAACTGGCGG |
| | TTGTCTTGGG |
| 1751 | CAAATGCAAC ATCCTCAAAA ATAGGAAGCA TCAACTGGAC |
| | CCGTACAGGA |
| 1801 | TACATTCCTA GTCCTGAGAG AAAAAGTAAT CTCCCTCTAA |
| | ATAGCTTATG |
| 1851 | GGGAAACTTT ATAGATATCG GCTCGATCAA TCAGCTTATA |
| | GAAACCAAGT |
| 1901 | CCAGTGGGGA GCCTTTTGAG CGTGAGCTAT GGCTTTCAGG |
| | AATTGCGAAT |
| 1951 | TTCTTCTATA GAGATTCTAT GCCCACCCGC CATGGTTTCC |
| | GCCATATCAG |
| 2001 | CGGGGGTTAT GCACTAGGGA TCACAGCAAC AACTCCTGCC |
| | GAGGATCAGC |
| 2051 | TTACTTTTGC CTTCTGCCAG CTCTTTGOTA GAGATCGCAA |
| | TCATATTACA |
| 2101 | GGTAAGAACC ACGGAGATAC TTACGGTGCC TCTTTGTATT |
| | TCCACCATAC |
| 2151 | AGAAGGGCTC TTCGACATCG CCAATTTCCT CTGGGGAAAA |
| | GCAACCCGAG |
| 2201 | CTCCCTGGGT GCTCTCTGAG ATCTCCCAGA TCATTCCTTT |
| | ATCGTTCGAT |
| 2251 | GCTAAATTCA GTTATCTCCA TACAGACAAC CACATGAAGA |
| | CATATTATAC |
| 2301 | CGATAACTCT ATCATCAAGG GTTCTTGGAG AAACGATGCC |
| | TTCTGTGCAG |
| 2351 | ATCTTGGAGC TAGCCTGCCT TTTGTTATTT CCGTTCCGTA |
| | TCTTCTGAAA |
| 2401 | GAAGTCGAAC CTTTTGTCAA AGTACAGTAT ATCTATGCGC |
| | ATCAGCAAGA |
| 2451 | CTTCTACGAG CGTCATGCTG AAGGACGCGC TTTCAATAAA |
| | AGCGAGCTTA |
| 2501 | TCAACGTAGA GATTCCThTA GGCGTCACCT TCGAAAGAGA |
| | CTCAAAATCA |
| 2551 | GAAAAGGGAA CTTACGATCT ThCTCTTATG TATATACTCG |
| | ATGCTTACCG |
| 2601 | ACGCAATCCT AAATGTCAAA CTTCCCTAAT AGCTAGCGAT |
| | GCTAACTGGA |
| 2651 | TGGCCTATGG TACCAACCTC GCACGACAAG GTTTTTCTGT |
| | TCGTGCTGCG |
| 2701 | AACCATTTCC AAGTGAACCC CCACATGGAA ATCTTCGGTC |
| | AATTCGCTTT |
| 2751 | TGAAGTACGA AGTTCTTCAC GAAATTATAA TACAAACCTA |
| | GGCTCTAAGT |
| 2801 | TTTGTTTCTA G |

[0787] The PSORT algorithm predicts inner membrane (0.187).

[0788] The protein was expressed in E. coli and purified as a GST-fusion product (FIG. 77A). The recombinant protein was used to immunise mice, whose sera were used in a Western blot (FIG. 77B) and for FACS analysis.

[0789] The cp6728 protein was also identified in the 2D-PAGE experiment.

[0790] These experiments show that cp6728 is a surface-exposed and immunoaccessible protein, and that it is a useful immunogen. These properties are not evident from the sequence alone.

### Example 78

[0791] The following C. pneumoniae protein (PID 4376847) was expressed <SEQ ID 155; cp6847>:

| | |
|---|---|
| 1 | MFVMKKLVRL CVVLLSLLPN VLFSSDLLRE EGIKKMMDKL |
| | IEYHVDAQEV |
| 51 | STKILSRSLS SYIQSFDPHK SYLSNQEVAV FLQSPETKKR |
| | LLKNYKAGNF |
| 101 | AIYRNINQLI HESILRARQW RNEWVKNPKE LVLEASSYQI |
| | SKQPMQWSKS |
| 151 | LDEVKQRQEA LLLSYLSLHL AGASSSRYEG KEEQLAALCL |
| | RQIENHENVY |
| 201 | LGINDHGVAM DRDEEAYQFH IRVVKALAHS LDAHTAYFSK |
| | DEALAMRIQL |
| 251 | EKGMCGIGVV LKEDXDGVVV REIIPGGPAA KSGDLQLGDI |
| | IYRVDGKDIE |
| 301 | HLSFRGVLDC LRGGHGSTVV LDIHRGESDH TIALRREKIL |
| | LEDRRVDVSY |
| 351 | EPYGDGVXGK VTLHSFYEGE NQVSSEQDLR RAIQGLKEKN |
| | LLGLVLDIRE |
| 401 | NTGGPLSQAI KVSGLFETNQ VVVVSRYADG TMRCYRTVSP |
| | KKFYDGPLAI |
| 451 | LVSKSSASAA EIVAQTLQDY GVALVVGDEQ TYGKGTIQHQ |
| | TITGDASQDD |
| 501 | CFKVTVGKYY SPSGKSTQLQ GVKSDILIPS LYAEDRLGER |
| | FLEHPLPADC |
| 551 | CDNVLRDPLT DLDTQTRPWF QXYYLPNLQK QETLWREMLP |
| | QLTKNSEQRL |
| 601 | SENSNFQAFL SQIKSSEKTD LSYGSNDLQL EESINILKDM |
| | ILLQQCRK* |

[0792] A predicted signal peptide is highlighted.

[0793] The cp6847 nucleotide sequence <SEQ ID 156> is:

| | |
|---|---|
| 1 | ATGTTCGTAA TGAAAAAACT TGTCCGTCTA TGCGTAGTTC |
| | TTCTTTCTTT |
| 51 | ACTTCCGAAT GTATTATTTT CTTCGGATCT TTTACGAGAA |
| | GAGGGCATCA |
| 101 | AAAAGATGAT GGACAAGCTG ATCGAGTATC ATGTCGAGGC |
| | TCAAGAGGTT |
| 151 | TCTACGGATA TACTCTCGCG TTCTTTATCT AGTTACATTC |
| | AATCTTTTGA |
| 201 | TCCTCATAAA TCTTATCTTT CAAACCAAGA GGTTGCAGTT |
| | TTTCTACAGT |
| 251 | CTCCGGAAAC AAAGAAACGT CTCTTAAAGA ATTATAAGGC |
| | AGGCAACTTT |
| 301 | GCTATTTATC GCAACATCAA TCAATTAATT CATGAGAGTA |
| | TTCTTCGTGC |
| 351 | CAGGCAGTGG AGAAACGAAT GGGTTAAGAA TCCAAAAGAG |
| | CTTGTATTGG |
| 401 | AGGCATCCTC ATATCAGATA TCGAAGCAAC CTATGCAATG |
| | GAGCAAATCT |
| 451 | TTAGACGAAG TGAAGCAGAG ACAACGCGCT CTACTCCTTT |
| | CCTATCTTTC |
| 501 | TTTACATCTT GCTGGAGCTT CTTCCTCTCG TTATGAGGGT |
| | AAAGAAGAGC |
| 551 | AGCTTGCTGC TCTGTGTCTA CGTCAAATCG AGAACCATGA |
| | GAATGTATAT |
| 601 | TTAGGTATCA ACGATCATGG TGTTGCTATG GATCGGGATG |
| | AAGAAGCCTA |
| 651 | CCAATTCCAT ATCCGTGTTG TTAAAGCTTT AGCTCATAGC |
| | TTAGATGCAC |
| 701 | ATACGGCGTA TTTCAGTAAG GACGAAGCGT TGGCGATGCG |
| | AATCCAACTA |
| 751 | GAAAAAGGCA TGTGTGGAAT TGGTGTTGTT CTGAAGGAAG |
| | ATATTGATGG |
| 801 | AGTTGTTGTT AGAGAAATCA TTCCTGGGGG ACCTGCGGCT |
| | AAATCTGGGG |
| 851 | ATCTTCAGCT TGGAGATATC ATCTATCGGG TGGATGGCAA |
| | GGATATCGAG |
| 901 | CATCTTTCTT TCCGCGGTGT TTTAGATTGT TTACGTGGAG |
| | GTCATGGCTC |
| 951 | TACTGTAGTC TTAGATATCC ATCGTGGGGA GAGCGATCAT |
| | ACGATCGCCT |
| 1001 | TGAGAAGGGA GAAAATCCTT TTAGAAGACC GTCGTGTGGA |
| | TGTTTCCTAT |
| 1051 | GAGCCTTATG GAGATGGTGT GATTGGGAAA GTTACGTTAC |
| | ATTCTTTTTA |
| 1101 | TGAAGGAGAA AATCAGGTTT CTAGTGAACA AGATCTACGT |
| | CGAGCGATTC |
| 1151 | AGGGATTAAA GGAGAAGAAC CTTCTTGGAT TAGTTTTAGA |
| | TATCCGAGAA |
| 1201 | AATACGGGTG GATTTTTATC TCAAGCGATC AAAGTTTCTG |
| | GTTTATTTAT |
| 1251 | GACCAATGGC GTTGTGGTTG TATCTCGCTA TGCTGATGGT |
| | ACCATGAAGT |
| 1301 | GCTACCGCAC AGTATCTCCT AAAAAATTCT ATGATGGTCC |
| | TTTGGCTATT |
| 1351 | TTAGTATCTA AAAGTTCCGC ATCAGCAGCG GAGATTGTAG |
| | CACAAACTCT |
| 1401 | CCAAGATTAT GGAGTTGCTT TAGTTGTTGG AGATGAGCAG |
| | ACCTATGGGA |
| 1451 | AGGGAACGAT TCAGCATCAA ACAATTACTG GAGATGCCTC |
| | TCAGGACGAT |
| 1501 | TGTTTTAAGG TTACTGTAGG GAAATATTAT TCCCCTTCTG |
| | GGAAATCGAC |
| 1551 | TCAACTTCAG GGAGTAAAAT CCGATATTTT AATTCCTTCT |
| | CTCTATGCTG |
| 1601 | AAGATCGTCT AGGAGAGCGT TTTCTAGAGC ATCCCTTACC |
| | TGCAGATTGC |
| 1651 | TGTGATAATG TACTTCACGA TCCTCTCACG GACTTGGATA |
| | CTCAAACACG |
| 1701 | TCCTTGGTTT CAAAAATACT ATCTTCCTAA TCTACAAAAG |
| | CAAGAGACTC |
| 1751 | TTTGGAGAGA GATGCTACCT CAGCTTAGGA AAAACAGTGA |
| | GCAAAGGCTT |
| 1801 | TCTGAGAATT CGAATTTTCA GGCATTTTTG TCGCAGATAA |
| | AATCATCTGA |
| 1851 | AAAAACGGAC CTATCCTATG GTTCCAATGA TTTACAATTG |
| | GAAGAGTCGA |
| 1901 | TAAACATTTT GAAGGACATG ATTTTATTAC AACAGTGTAG |
| | AAAATAA |

[0794] The PSORT algorithm predicts periplasmic (0.932).

[0795] The protein was expressed in E. coli and purified as a GST-fusion product (FIG. 78A). The recombinant protein was used to immunise mice, whose sera were used in a Western blot (FIG. 78B) and for FACS analysis.

[0796] These experiments show that cp6847 is a surface-exposed and immunoaccessible protein, and that it is a useful immunogen. These properties are not evident from the sequence alone.

### Example 79

[0797] The following C. pneumoniae protein (PID 4376969) was expressed <SEQ ID 157; cp6969>:

| | |
|---|---|
| 1 | MRLFSLGTIY LFFSLALSSC CGYSILNSPY HLSSLGKSLL |
| | QERIFIAPIK |
| 51 | EDPHGQLCSA LTYELSKRSF AISGRSSCAG YTLKVELLNG |
| | IDKNIGFTYA |
| 101 | PNKLGDKTHR HFIVSNBGRL SLSAKVQLIN NDTQEVLIDQ |
| | CVARESVDFD |
| 151 | FEPDLGTANA HEFALGQFEM HSEAIKSARR ILSIRLAETI |
| | AQQVYYDLF* |

[0798] A predicted signal peptide is highlighted.

[0799] The cp6969 nucleotide sequence <SEQ ID 158> is:

| | |
|---|---|
| 1 | ATGAGATTGT TTTCTTTAGG CACGATTTAT CTTTTTTTTT |
| | CTCTAGCACT |
| 51 | TTCGTCATGC TGTGGTTACT CTATTTTAAA CAGCCCGTAT |
| | CACTTATCGT |
| 101 | CTTTAGGTAA GTCTTTATTA CAGGAAAGAA TTTTCATTGC |
| | TCCCATAAAA |
| 151 | GAAGATCCTC ATGGTCAGCT CTGCTCAGCT CTAACTTATG |
| | AGCTTAGTAA |
| 201 | GCGTTCTTTT GCTATCTCTG GAAGGAGTTC TTGCGCAGCC |
| | TATACTCTTA |
| 251 | AAGTAGAGCT TCTGAATGGT ATTGACAAGA ATATAGGTTT |
| | TACGTATGCC |
| 301 | CCAAATAAAC TCGGAGATAA GACTCACAGG CATTTTATAG |
| | TCTCTAATGA |
| 351 | AGGCAGACTA TCACTATCTG CAAAAGTACA GCTTATCAAT |
| | AATGACACTC |
| 401 | AAGAAGTCCT TATAGACCAA TGTGTTGCTC GAGAGTCTGT |
| | AGACTTTGAC |
| 451 | TTTGAGCCTG ACTTAGGAAC AGCAAACGCT CATGAATTTC |
| | CTTTAGGCCA |
| 501 | ATTTGAAATG CATAGTGAAG CCATAAAAAG TGCTCGCCGT |
| | ATACTATCTA |
| 551 | TACGCCTAGC CGAGACGATT GCTCAACAGG TACACTATGA |
| | CCTTTTTTGA |

[0800] The PSORT algorithm predicts inner membrane (0.126).

[0801] The protein was expressed in E. coli and purified as a GST-fusion product (FIG. 79A). The recombinant protein was used to immunise mice, whose sera were used in a Western blot (FIG. 79B) and for FACS analysis.

[0802] These experiments show that cp6969 is a surface-exposed and immunoaccessible protein, and that it is a useful immunogen. These properties are not evident from the sequence alone.

### Example 80

[0803] The following C. pneumoniae protein (PID 4377109) was expressed <SEQ ID 159; cp7109>:

| | |
|---|---|
| 1 | MKKTCCQNYR SIGVVFSVVL FVLTTQTLFAGHFIDIGTSG |
| | LYSWARGVSG |
| 51 | DGRVVVGYEG GNAFKYVDGE KFLLEGLVPR SEALVFKASY |
| | DGSVIIGISD |
| 101 | QDPSCRAVKW VNGALVDLGI FSEGMQSFAE GVSSDGWPIV |
| | GCLYSDDTET |
| 151 | NFAVKWDETG MVVLPNLPED RHSCAWDASE DGSVIVGDAM |
| | GSEEIAKAVY |
| 201 | WKDGEQHLLS NIPGAKRSSA HAVSKDGSFI VGEFISEENE |
| | VHAFVYHNGV |
| 251 | IKDIGTLGGD YSVATGVSRD GKVIVGHSTR TDGEYRAFKY |
| | VDGRMIDLGT |
| 301 | LGGSASFAFG VSDDGKTIVG KFETELGECH AFIYLDD* |

[0804] A predicted signal peptide is highlighted.

[0805] The cp7109 nucleotide sequence <SEQ ID 160> is:

| | |
|---|---|
| 1 | ATGAAAAAGA CATGTTGCCA AAATTACAGA TCGATAGGCG |
| | TTGTGTTCTC |
| 51 | TGTGGTACTT TTCGTTCTTA CAACACAGAC GCTGTTTGCA |
| | GGACATTTTA |
| 101 | TTGATATTGG AACTTCTGGA TTATATTCTT GGGCTCGAGG |
| | TGTATCTGGA |
| 151 | GATGGCCGCG TTGTCGTAGG TTATGAAGGT GGCAATGCAT |
| | TTAAATATGT |
| 201 | TGATGGTGAG AAATTTCTGT TAGAAGGTTT GGTCCCGAGA |
| | TCCGAGGCCT |
| 251 | TGGTATTTAA AGCTTCTTAT GATGGCTCTG TAATTATAGG |
| | AATCTCGGAT |
| 301 | CAAGATCCGT CTTGCCGCGC TGTGAAGTGG GTAAACGGTG |
| | CACTTGTTGA |
| 351 | TCTTGGAATA TTTTCTGAGG GAATGCAATC TTTTGCAGAG |
| | GGTGTTTCCA |
| 401 | GTGATGGAAA GACGATTGTA GGGTGCCTAT ATAGTGATGA |
| | TACAGAGACA |
| 451 | AACTTTGCTG TGAAGTGGGA TGAAACAGGA ATGGTTGTTC |
| | TCCCTAACTT |
| 501 | ACCAGAAGAT CGACATTCTT GCGCTTGGGA TGCCTCTGAA |
| | GATGGCTCTG |
| 551 | TGATTGTAGG GGACGCCATG GGTAGCGAGG AAATTGCCAA |
| | GGCAGTGTAC |
| 601 | TGGAAGGACG GTGAACAACA TCTGCTTTCT AATATCCCAG |
| | GAGCTAAAAG |
| 651 | ATCGTCAGCA CATGCAGTTT CTAAAGATGG ATCTTTTATC |
| | GTAGGCGAGT |
| 701 | TCATCAGTGA AGAAAATGAA GTTCATGCCT TTGTTTATCA |
| | CAACGGTGTT |
| 751 | ATCAAAGATA TCGGGACTTT AGGAGGAGAT TACTCTGTAG |
| | CAACTGGAGT |
| 801 | TTCTAGGGAT GGTAAGGTCA TCGTGGGTCA TTCTACAAGA |
| | ACAGATGGTG |
| 851 | AATACCGTGC ATTTAAATAT GTGGATGGAA GAATGATAGA |
| | TTTGGGGACT |
| 901 | TTAGGAGGTT CAGCATCTTT TGCTTTTGGT GTTTCTGACG |
| | ATGGCAAAAC |
| 951 | AATCGTAGGA AAATTTGAAA CAGAGCTAGG AGAATGTCAT |
| | GCCTTTATCT |
| 1001 | ACCTTGATGA TTAG |

[0806] The PSORT algorithm predicts outer membrane (0.887).

[0807] The protein was expressed in E. coli and purified as a GST-fusion product (FIG. 80A). The recombinant protein was used to immunise mice, whose sera were used in a Western blot (FIG. 80B) and for FACS analysis.

[0808] These experiments show that cp7109 is a surface-exposed and immunoaccessible protein, and that it is a useful immunogen. These properties are not evident from the sequence alone.

### Example 81

[0809] The following C. pneumoniae protein (PID 4377110) was expressed <SEQ ID 161; cp7110>:

| | |
|---|---|
| 1 | MAAIKQILRS MLSQSSLWMV LFSLYSLSGY CYVITDKPED |
| | DFHSSSAVKW |
| 51 | DHWGKTTLSR LSNXKASAKA VSGTGATTVG FIKDTWSRTY |
| | AVRWNYWGPK |
| 101 | ELPTSSWVKK SKATGISSDG SIIAGIVENE LSQSFAVTWK |
| | NNEMYLLPST |
| 151 | WAVQSKAYGI SSDGSVIVGS AKDAWSRTFA VKWTGHEAQV |
| | LPVGWAVKSV |
| 201 | ANSVSANGSI IVGSVQDASG ILYAVKWEGN TITHLGTLGG |
| | YSAIAKAVSN |
| 251 | NGKVIVGRSE TYYGEVHAPC HKNGVMSDLG TLGGSYSAAK |
| | GVSATGKVIV |
| 301 | GMSTTANGKL HAFKYVGGRM IDLGEYSWKE ACENAVSIDG |
| | EIIVGVQSE* |

[0810] A predicted signal peptide is highlighted.

[0811] The cp7110 nucleotide sequence <SEQ ID 162> is:

| | |
|---|---|
| 1 | ATGGCAGCTA TAAAACAAAT TTTACGTTCT ATGCTATCTC |
| | AGAGTAGCTT |
| 51 | ATGGATGGTC CTATTTTCAT TATATTCTCT ATCTGGTTAT |
| | TGCTATGTAA |
| 101 | TTACAGACAA ACCAGAAGAT GACTTCCATT CTTCATCCGC |
| | AGTAAAATGG |
| 151 | GATCATTGGG GAAAGACAAC TCTCTCAAGA TTATCAAATA |
| | AAAAAGCCTC |
| 201 | TGCAAAAGCT GTTTCAGGAA CTGGTGCTAC AACTGTCGGC |
| | TTTATAAAAG |
| 251 | ACACTTGGTC TCGAACATAC GCAGTAAGAT GGAATWATTG |
| | GGGGACCAAA |
| 301 | GAACTCCCTA CCAGCTCATG GGTAAAAAAA TCAAAAGCAA |
| | CAGGAATCTC |
| 351 | CTCTGATGGG TCTATAATCG CGGGGATTGT CGAGAATGAG |
| | CTTTCTCAAA |
| 401 | GTTTCGCAGT CACATGGAAA AACAATGAAA TGTATTTGCT |
| | CCCTTCCACA |
| 451 | TGGGCAGTGC AATCTAAAGC GTATGGAATT TCTTCTGATG |
| | GCTCTGTTAT |
| 501 | TGTAGGGAGT GCTAAGGATG CTTGGTCGCG AACTTTCGCT |
| | GTGAAGTGGA |
| 551 | CGGGACACGA GGCTCAGGTG TTACCAGTAG GCTGGGCTGT |
| | CAAATCTGTA |
| 601 | GCGAATTCTG TATCTGCCAA TGGATCTATA ATTGTAGGGT |
| | CTGTACAAGA |
| 651 | CGCCTCTGGA ATTCTTTATG CTGTAAAGTG GGAAGGGAAC |
| | ACTATTACAC |
| 701 | ATCTAGGAAC TTTAGGAGGC TATTCTGCCA TTGCAAAAGC |
| | TGTATCCAAT |
| 751 | AATGGCAACG TCATTGTAGG GAGATCCGAA ACATATTATG |
| | GAGAGGTCCA |
| 801 | TGCTTTCTGT CATAAGAATG GCGTCATGTC AGACCTCGGC |
| | ACCCTCGGAG |
| 851 | GATCTTATTC TGCAGCTAAG GGAGTCTCTG CAACTGGAAA |
| | AGTTATTGTC |
| 901 | GGTATGTCCA CAACAGCAAA TGGGAAATTG CATGCCTTTA |
| | AATATGTCGG |
| 951 | TGGAAGAATG ATCGACTTAG GAGAGTATAG CTGGAAAGAA |
| | GCGTGTGCAA |
| 1001 | ACGCTGTTTC TATTGATGGA GAAATTATTG TTGGAGTCCA |
| | ATCAGAATAA |

[0812] The PSORT algorithm predicts outer membrane (0.827).

[0813] The protein was expressed in E. coli and purified as a GST-fusion product (FIG. 81A). The recombinant protein was used to immunise mice, whose sera were used in a Western blot (FIG. 81B) and for FACS analysis.

[0814] These experiments show that cp7110 is a surface exposed and immunoaccessible protein, and that it is a useful immunogen. These properties are not evident from the sequence alone.

[0815] FIG. 191 shows a schematic representation of the structural relationships between of cp7105, cp7106, cp7107, cp7108, cp7109 and cp7110, each of which is identified herein. These six proteins may be grouped in a new family of related outer membrane-associated proteins. These proteins have a repeat structure in common (cf. the pmp family).

### Example 82

[0816] The following C. pneumoniae protein (PID 4377127) was expressed <SEQ ID 163; cp7127>:

| | |
|---|---|
| 1 | MVFFRNSLLH LVALSGMLCC SSGVALTIAE KMASLEHSGR |
| | GADDYEGMAS |
| 51 | FNANMREYSL QLSKLYEEAR KLRASGTEDE ALWKDLIERI |
| | GEVRGYLREI |
| 101 | EELWAAEIRE KGGNLEDYAL WNHPETTIYN LVTDYGTEDS |
| | IYLIPQEIGA |
| 151 | IKIATLSKFV VPKESFEDCL TQILSRLGIG VRQVNSWIKE |
| | LYMMRKEGCS |
| 201 | VAGVFSSRKD LEALPETAYI GFVLNSNVDA HTNQHVLKKF |
| | INPETTHVDV |
| 251 | IAGRVWIFGS AGEVGELLKI YNFVQSESIR QEYRVIPLTK |
| | IDPGEMISIL |
| 301 | NAAFREDLTK DVSEESLGLR VVPLQYQGRS LFLSGTAALV |
| | QQALTLIREL |
| 351 | EEGIENPTDK TVFWYNVKHS DPQELAALLS QVHDVFSGEN |
| | KASVGAADGC |
| 401 | GSQLNASIQI DTTVSSSAKD GSVKYGNFIA DSKTGTLIMV |
| | VEKEVLPRIQ |
| 451 | MLLKKLDVPK KMVRIEVLLF ERKLAHEQKS GLNLLRLGEE |
| | VCKKGCSPSV |
| 501 | SWAGGTGILE FLFKGSTGSS IVPGYDLAYQ FLMAQEDVRI |
| | NASPSVVTMN |
| 551 | QTPARIAVVD EMSIAVSSDK DKAQYNRAQY GIMIKMLPVI |
| | NVGEEDGKSY |
| 601 | ITLETDITFD TTGKNHDDRP DVTRRNITNK VRIADGETVI |
| | IGGLRCKQMS |
| 651 | DSHDGIPFLG DIPGIGKLFG MSSTSDSLTE MFVFITPKIL |
| | ENPVEQQERK |
| 701 | EEALLSSRPG EREEYYQALA ASEAAARAAH KKLENFPASG |
| | VSLSQVERQB |
| 751 | YDGC* |

[0817] A predicted signal peptide is highlighted.

[0818] The cp7127 nucleotide sequence <SEQ ID 164> is:

| | |
|---|---|
| 1 | ATGGTTTTTT TCCGTAATTC TTTACTGCAT TTAGTTGCCC |
| | TATCCGGAAT |
| 51 | GCTCTGTTGT TCTTCTGGAG TGGCTTTAAC GATAGCCGAG |
| | AAGATGGCTT |
| 101 | CTTTAGAGCA CTCGGGGAQA GGAGCAGACG ATTATGAGGG |
| | GATGGCTTCG |
| 151 | TTTAATGCCA ATATGAGGQA GTATAGCCTT CAGCTGAGCA |
| | AGTTGTATGA |
| 201 | GGAAGCACGA AAGCTACGCG CTTCTGGAAC TGAGGATGAA |
| | GCTCTGTGGA |
| 251 | AGGACTTAAT TCGACGGATT GGTGAGGTGC GAGGCTATCT |
| | TCGAGAGATC |
| 301 | GAGGAGCTTT GGGCTGCAGA AATTCGTGAG AAAGGGGGCA |
| | ATCTCGAGGA |
| 351 | CTACGCCCTC TGGAATCACC CAGAGACTAC GATTTACAAT |
| | CTTGTTACCG |
| 401 | ATTACGGAAC CGAAGACTCT ATTTATTTGA TTCCTCAAGA |
| | AATCGGAGCG |
| 451 | ATTAAAATCG CAACCTTATC GAAATTTGTA GTTCCTAAAG |
| | AGTCTTTCGA |
| 501 | AGACTGTCTC ACTCAGATCC TATCTCGCTT AGGTATTGGC |
| | GTGCGTCAGG |
| 551 | TCAATTCTTG GATTAAGGAA CTTTATATGA TGCGTAAGGA |
| | GGGCTGCAGT |
| 601 | GTTGCTGGAG TTTTTTCCTC CAGAAAAGAT TTAGAGGCGC |
| | TCCCAGAAAC |
| 651 | AGCCTATATT GGTTTTGTAT TGAATTCGAA CGTAGATGCG |
| | CATACCAATC |
| 701 | AACATGTCTT AAAAAAGTTC ATTAACCCTG AAACAACGCA |
| | TGTAGATGTG |
| 751 | ATTGCAGGAC GTGTGTGGAT TTTTGGTTCT GCGGGGGAAG |
| | TCGGCGAGCT |
| 801 | TCTGAAGATT TATAATTTTG TGCAGTCGGA GAGCATACGT |
| | CAAGAGTATC |
| 851 | GGGTGATTCC CTTAACTAAG ATCGATCCAG GGGAGATGAT |
| | TTCCATTCTC |
| 901 | AACGCAGCAT TTCGTGAGGA TCTGACTAAA GATGTTAGTG |
| | AAGAATCTTT |
| 951 | AGGCCTTCGT GTAGTTCCTT TACAGTATCA AGGGCGTTCG |
| | TTGTTTTTAA |
| 1001 | GTGGAACCGC GGCGTTAGTG CAGCAAGCGC TGACTCTCAT |
| | TCGAGAGCTT |
| 1051 | GAAGAAGGGA TTGAGAACCC TACGGATAAA ACAGTATTTT |
| | GGTATAACGT |
| 1101 | CAAGCACTCC GATCCCCAAG AGTTGGCGGC ATTGCTTTCC |
| | CAAGTCCATG |
| 1151 | ATGTCTTCTC TGGCGAGAAT AAGGCGAGTG TCGGAGCTGC |
| | AGATGGATGT |
| 1201 | GGGTCGCAAT TAAATGCCTC GATCCAAATT GATACTACAG |
| | TAAGTTCTTC |
| 1251 | TGCGAAAGAT GGCTCAGTGA AGTACGGAAA CTTCATCGCG |
| | GATTCTAAGA |
| 1301 | CAGGAACTCT GATTATGGTG GTTGAGAAAG AAGTTCTTCC |
| | ACGTATTCAG |
| 1351 | ATGCTACTTA AGAAACTAGA TGTCCCTAAA AAGATGGTCC |
| | GTATCGAGGT |
| 1401 | GCTGTTATTT GAAAGAAAAT TGGCACATGA GCAGAAATCT |
| | GGGTTAAATC |
| 1451 | TTCTACGTCT TGGTGAGGAA GTTTGTAAAA AAGGGTGCAG |
| | TCCTTCTGTG |
| 1501 | TCTTGGGCCG GGGGTACTGG CATACTAGAA TTTTTATTTA |
| | AAGGAAGTAC |
| 1551 | GGGATCTTCG ATAGTTCCTG GTTATGATCT CGCCTATCAA |
| | TTTTTAATGG |
| 1601 | CTCAAGAGGA CGTTCGGATT AATGCGAGTC CTTCTGTAGT |
| | TACTATGAAC |
| 1651 | CAAACCCCAG CACGGATTGC TGTTGTTGAT GAAATGTCAA |
| | TAGCGGTGTC |
| 1701 | TTCAGATAAA GATAAAGCGC AATACAATCG TGCGCAGTAC |
| | GCTATCATGA |
| 1751 | TAAAAATGCT CCCCGTAATT AATGTGGGAG AGGAAGACGG |
| | AAAAAGTTAC |
| 1801 | ATTACTTTAG AGACAGACAT CACCTTTGAT ACTACGGGAA |
| | AAAATCATGA |
| 1851 | TGATCGTCCT GATGTTACAA GGCGTAATAT TACTAATAAG |
| | GTGCGCATTG |
| 1901 | CTGACGGAGA GACTGTGATT ATTGGAGGTT TGCGTTGCAA |
| | ACAGATGTCA |
| 1951 | GATTCTCATG ATGGCATTCC TTTCCTTGGA GACATTCCTG |
| | GTATAGGGAA |
| 2001 | GTTATTTGGA ATGAGTTCCA CATCAGACAG TCTCACGGAG |
| | ATGTTTGTAT |
| 2051 | TTATCACTCC GAAGATCCTA GAAAATCCTG TAGAGCAACA |
| | AGAACGTAAA |
| 2101 | GAAGAAGCTT TACTCTCTTC GCGCCCTGGA GAGAGAGAAG |
| | AATACTATCA |
| 2151 | GGCTTTAGCA GCTAGTGAGG CTGCAGCACG AGCAGCTCAT |
| | AAAAAATTAG |
| 2201 | AGATGTTCCC GGCATCAGGA GTATCTTTAT CTCAGGTAGA |
| | GAGGCAAGAA |
| 2251 | TACGATGGCT GCTAG |

[0819] The PSORT algorithm predicts periplasmic (0.920).

[0820] The protein was expressed in E. coli and purified as a GST-fusion product (FIG. 82A) and also in his-tagged form. The recombinant proteins were used to immunise mice, whose sera were used in a Western blot (FIG. 82B) and for FACS analysis.

[0821] These experiments show that cp7127 is a surface-exposed and immunoaccessible protein, and that it is a useful immunogen. These properties are not evident from the sequence alone.

### Example 83

[0822] The following C. pneumoniae protein (PID 4377133) was expressed <SEQ ID 165; cp7133>:

| | |
|---|---|
| 1 | MQPFIFTLLC LPSLVSLVAF DAANAKRCA CAQTIERGEN |
| | FFSIKRSACA |
| 51 | EIEYQEKSRH ASAIERISKD KGKVTPKQIA KVATKKKQRY |
| | RLLQVPFSRP |
| 101 | PNNSRYNLYA LLSEPPECYS DTASWYAIFI RLLRRAYVDT |
| | GNVPPGSEYA |
| 151 | IANALISNKQ EILERGAQLG PDVIETLTLP EEQABIFYKM |
| | LKGSSNSQSL |
| 201 | LNFLHYEEKS LGHCKLNLIF MDPLLLEAVL DHPDAYRETS |
| | LLRDGIWEAV |
| 251 | KRQEHAIQEH GQAAALELFK TRTDFRLELR DKMQLLLSRY |
| | DLTPLLNKKM |
| 301 | FDYTLGSAGD YLFLVDPDTX AISRCRCPSK SIKL |

[0823] A predicted signal peptide is highlighted.

[0824] The cp7133 nucleotide sequence <SEQ ID 166> is:

| | |
|---|---|
| 1 | ATGCAACCTT TTATCTTTAC TTTACTGTGC TTGACATCTT |
| | TGGTTTCTTT |
| 51 | AGTCGCCTTT GATGCTGCGA ATGCTCGTAA ACGTTGTGCC |
| | TGTGCTCAAA |
| 101 | CTATAGAACG TGGAGAGAAC TTCTTTTCCA TAAAACGCTC |
| | TGCTTGTGCT |
| 151 | GAAATCGAAT ATCAAGAAAA ATCTCGCCAC GCCTCAGCAA |
| | TTGAAAGAAT |
| 201 | CTCAAAAGAT AAAGGCAAAG TCACTCCAAA GCAGATTGCG |
| | AAAGTAGCTA |
| 251 | CTAAGAAAAA GCAAAGATAC CGTTTATTGC AGGTTCCTTT |
| | TTCAAGGCCT |
| 301 | CCGAATAACT CAAGGTATAA CCTCTATGCT TTGCTTAGTG |
| | AACCTCCCGA |
| 351 | ATGCTATAGC GATACAGCAT CATGGTATGC TAPTTTTATT |
| | CGGTTACTPC |
| 401 | GACGTGCTTA TGTAGACACG GGAAATGTAC CTCCTGGATC |
| | TGAGTATGCC |
| 451 | ATCGCTAATG CTTTGATAAG TAACAAACAA GAGATTTTAG |
| | AGAGGGGAGC |
| 501 | GCAGCTTGGA CCCGATGTTA TTGAAACTCT AACATTGCCT |
| | GAGGAACAAG |
| 551 | CCGAGATTTT TTATAAAATG CTCAAAGGGT CGTCAAACTC |
| | TCAGTCGCTA |
| 601 | CTGAATTTTC TGCATTATGA AGAGAAAAGC TTAGGCCAGT |
| | GTAAGCTAAA |
| 651 | TCTGATCTTC ATGGATCCCC TACTGTTAGA AGCTGTTCTA |
| | GATCATCCCG |
| 701 | ATGCTTATAG GGAAACGTCG CTCCTGCGCG ATGGCATTTG |
| | GGAAGCGGTG |
| 751 | AAGCGTCAAG AACATGCCAT CCAAGAACAT GOCCAGGOAG |
| | CTGCTTTGGA |
| 801 | GCTTTTTAAA ACACGCACCG ACTTCCGCCT GGAGCTGCGA |
| | GATAAGATGC |
| 851 | AGTTACTTCT AAGTCGATAC GATTTGCTCC CCTTATTAAA |
| | TAAAAAAATG |
| 901 | TTCGACTACA CCTTAGGAAG TGCCGGAGAT TACTTATTTT |
| | TGGTAGACCC |
| 951 | AGATACTAAG GCAATTTCTC GATGTCGCTG CCCTTCAAAG |
| | AGTATTAAAT |
| 1001 | TATAA |

[0825] The PSORT algorithm predicts outer membrane (0.92).

[0826] The protein was expressed in E. coli and purified as a GST-fusion product (FIG. 83A) and also in his-tagged form. The recombinant proteins were used to immunise mice, whose sera were used in a Western blot (FIG. 83B) and for FACS analysis.

[0827] These experiments show that cp7133 is a surface-exposed and immunoaccessible protein, and that it is a useful immunogen. These properties are not evident from the sequence alone.

### Example 84

[0828] The following C. pneumoniae protein (PID 4377222) was expressed <SEQ ID 167; cp7222>:

| | |
|---|---|
| 1 | MNRRDMVITA VVVNAILLVA LFVTSKRIGV KDYDEGFRNF |
| | ASSKVTQAVV |
| 51 | SEEKVIEKPV VAEVPSRPIA KETLAAQFIE SKPVIVTTPP |
| | VPVVSETPEV |
| 101 | PTVAVPPQPV RBTVKEEQAP YATVVVKKGD FLBRIARANH |
| | TTVAKLMQIN |
| 151 | DLTTTQLIKG QVIKVPTSQD VSNEKTPQTQ TANPENYYIV |
| | QEGDSPWTIA |
| 201 | LRNHIRLDDL LKMNDLDEYK ARRLKPGDQL RIR* |

[0829] A predicted signal peptide is highlighted.

[0830] The cp7222 nucleotide sequence <SEQ ID 168> is:

| | |
|---|---|
| 1 | ATGAATCGTA GAGACATGGT AATAACAGCT GTCGTAGTGA |
| | ATGCTATATT |
| 51 | GCTTGTGGCT CTTTTCGTCA CATCAAAGCG TATTGGCGTC |
| | AAGGACTATC |
| 101 | ACGAGGGATT CCGTAATTTT GCTTCTAGCA AGGTTACACA |
| | AGCAGTAGTT |
| 151 | TCAGAAGAAA AAGTCATAGA AAAGCCTGTA GTCGCAGAAG |
| | TGCCTAGCCG |
| 201 | TCCTATCGCT AAAGAGACTC TAGCTGCACA GTTTATTGAA |
| | AGTAAGCCGG |
| 251 | TTATTGTAAC CACACCACCC GTGCCTGTTG TTAGCGAAAC |
| | CCCAGAAGTG |
| 301 | CCTACTGTGG CAGTTCCCCC TCAGCCTGTT CGTGAGACAG |
| | TAAAAGAGGA |
| 351 | ACAAGCTCCT TATGCTACTG TTGTAGTGAA AAAAGGAGAT |
| | TTTCTCGAAC |
| 401 | GCATTGCGAG AGCAAATCAT ACTACCGTTG CAAAATTGAT |
| | GCAGATCAAT |
| 451 | GATCTTACCA CCACCCAACT TAAAATTGGT CAGGTCATCA |
| | AAGTCCCTAC |
| 501 | GTCTCAAGAT GTCAGCAACG AAAAAACTCC TCAAACACAG |
| | ACCGCAAACC |
| 551 | CTGAAAATTA TTATATCGTC CAAGAAGGGG ATAGCCCGTG |
| | GACAATAGCA |
| 601 | TTGCGTAACC ATATTCGATT GGATGATTTG CTAAAAATGA |
| | ATGATCTCGA |
| 651 | TGAATATAAA GCCCGGCGCC TTAAGCCTGG AGATCAGTTG |
| | CGCATACGTT |
| 701 | GA |

[0831] The PSORT algorithm predicts periplasmic (0.935).

[0832] The protein was expressed in E. coli and purified as a GST-fusion product (FIG. 84A) and also in his-tagged form. The recombinant proteins were used to immunise mice, whose sera were used in a Western blot (FIG. 84B) and for FACS analysis.

[0833] These experiments show that cp7222 is a surface-exposed and immunoaccessible protein, and that it is a useful immunogen. These properties are not evident from the sequence alone.

### Example 85

[0834] The following C. pneumoniae protein (PID 4377225) was expressed <SEQ ID 169; cp7225>:

| | |
|---|---|
| 1 | MKGTPQYHFI GIGGIGMSAL AHILLDRGYE VSGSDLYESY TIESLKAKGA |
| 51 | RCFSGHDSSH VPHDAVVVYS SSIAPDNVEY LTAIQRSSRL LHRAELLSQL |
| 101 | MEGYESILVS GSHGKTGTSS LIRAIFQEAQ KDPSYAIGGL AANCLNGYSG |
| 151 | SSKIFVAEAD ESDGSLKHYT PRAVVITNID NEHLNNYAGN LDNLVQVIQD |
| 201 | FSRKVTDLNK VFYNGDCPIL KGNVQGISYG YSPECQLHIV SYNQKAWQSH |
| 251 | FSFTFLGQEY QDIELNLPGQ HNAANAAAAC GVALTFGIDI NIIRKALKKF |
| 301 | SGVHRRLERK NISESFLFLE DYAHHPVEVA HTLRSVRDAV GLRRVIAIFQ |
| 351 | PHRFSRLEEC LQTFPKAFQE ADEVILTDVY SAGESPRESI ILSDLAEQIR |
| 401 | KSSYVHCCYV PHGDIVDYLR NYIRIHDVCV SLGAGNIYTI GEALKDWNPK |
| 451 | KLSIGLVCGG KSCEHDISLL SAQHVSKYIS PEFYDVSYFI INRQGLWRTG |
| 501 | KDFPHLIEET QGDSPLSSEI ASALAKVDCL FPVLHGPFGE DGTIQGFFEI |
| 551 | LGKPYAGPSL SLAATAMDKL LTKRIASAVG VPVVPYQPLN LCFWKRNPEL |
| 601 | CIQNLIETFS FPMIVKTAHL GSSIGIFLVR DKEELQEKIS EAFLYDTDVF |
| 651 | VEESRLGSRE IEVSCIGHSS SWYCMAGPNE RCGASGFIDY QEKYGFDGID |
| 701 | CAKISFDLQL SQESLDCVRE LAERVYRAMQ GKGSARIDFF LDEEGNYWLS |
| 751 | EVNPIPGMTA ASPFLQAFVH AGWTQEQIVD HFIIDALHKF DKQQTIEQAF |
| 801 | TKEQDLVKR* |

[0835] The cp7225 nucleotide sequence <SEQ ID 170> is:

| | |
|---|---|
| 1 | ATGAAGGGAA CTCCTCAGTA TCATTTTATC GGTATCGGTG GTATAGGAAT |
| 51 | GAGCGCTTTA GCTCATATTT TGCTTGATCG TGGCTATGAG GTCTCTGGAA |
| 101 | GCGACTTATA TGAAAGCTAT ACGATCGAAA GCCTGAAAGC TAAAGGTGCG |
| 151 | AGGTGTTTCT CAGGCCATGA TTCCTCCCAT GTTCCTCATG ATGCCGTCGT |
| 201 | TGTTTATAGC TCAAGTATAG CCCCTGATAA TGTAGAGTAT CTTACCGCTA |
| 251 | TTCAAAGATC ATCACGTCTT CTTCATAGAG CAGAGCTCTT GAGTCAGCTT |
| 301 | ATGGAGGGTT ATGAAAGCAT TCTGGTTTCA GGAAGCCATG GGAAGACAGG |
| 351 | GACCTCATCT CTAATTCGAG CGATTTTCCA GGAAGCTCAG AAAGATCCCT |
| 401 | CCTATGCTAT TGGAGGACTC GCTGCAAACT GCCTGAATGG GTATTCTGGA |
| 451 | TCATCGAAAA TCTTCGTTGC CGAAGCCGAT GAAAGTGATG GGTCTTTAAA |
| 501 | GCACTACACT CCCCGTGCAG TAGTCATTAC AAATATAGAT AATGAACATT |
| 551 | TGAATAATTA CGCTGGGAAT CTTGATAACC TGGTTCAGGT AATCCAGGAC |
| 601 | TTCTCTAGAA AAGTAACAGA TCTCAATAAG GTATTCTATA ACGGGGATTG |
| 651 | TCCTATTTTG AAAGGAAATG TCCAAGGGAT TTCTTATGGA TATTCACCAG |
| 701 | AATGTCAATT GCATATCGTT TCCTATAATC AAAAGGCATG GCAATCTCAC |
| 751 | TTTTCCTTTA CCTTTTTAGG CCAGGAGTAT CAACACATTG AGCTCAATCT |
| 801 | CCCTGGACAA CATAACGCTG CAAATGCAGC AGCAGCCTGT GGAGTTGCTC |
| 851 | TTACCTTTGG CATAGACATA AACATCATTC GAAAAGCTCT CAAAAAATTC |
| 901 | TCGGGAGTTC ATCGACGTCT AGAAAGAAAA AATATATCCG AAAGCTTTCT |
| 951 | TTTCTTAGAA GATTATGCTC ATCATCCTGT AGAGGTTGCA CATACCCTGC |
| 1001 | GCTCTGTGCG TGATGCTGTG GGTTTGCGAA GAGTCATCGC AATTTTTCAA |
| 1051 | CCACATCGAT TCTCTCGTTT AGAAGAGTGC TTACAAACCT TCCCCAAAGC |
| 1101 | TTTCCAAGAA GCTGATGAAG TCATACTTAC AGATGTCTAT AGTGCCGGAG |
| 1151 | AAAGTCCTAG AGAGTCTATC ATTCTTTCCG ACCTTGCGGA ACAGATTCGT |
| 1201 | AAGTCTTCTT ATGTCCATTG TTGTTATGTT CCCCATGGAG ACATCGTAGA |
| 1251 | TTATCTACGA AACTACATTC GCATTCATGA TGTCTGTGTT TCTCTAGGAG |
| 1301 | CTGGAAATAT CTATACTATT GGAGAGGCTT TAAAAGACTT TAACCCTAAA |
| 1351 | AAATTATCCA TAGGACTCGT CTGTGGAGGG AAATCTTGCG AACACGATAT |
| 1401 | TTCTCTACTT TCTGCTCAAC ATGTCTCTAA ATATATTTCT CCTGAATTCT |
| 1451 | ATGATGTGAG TTACTTCATC ATAAATCGTC AGGGCTTATG GAGAACAGGA |
| 1501 | AAGGATTTTC CTCATCTTAT TGAAGAGACT CAAGGGGATT CGCCACTTTC |
| 1551 | TTCTGAAATC GCTTCAGCTT TAGCAAAAGT CGACTGTTTG TTTCCCGTGC |
| 1601 | TCCATGGCCC ATTTGGAGAG GATGGTACGA TCCAGGGATT TTTTGAAATC |
| 1651 | TTAGGAAAAC CTTATGCCGG ACCCTCACTA TCTTTAGCAG CAACTGCAAT |
| 1701 | GGATAAGCTG TTAACAAAAC GAATTGCATC AGCAGTGGGT GTTCCTGTAG |
| 1751 | TCCCTTACCA ACCTTTAAAT CTCTGTTTCT GGAAACGCAA TCCAGAACTA |
| 1801 | TGTATTCAGA ATCTTATAGA GACATTTTCT TTCCCTATGA TTGTAAAAAC |
| 1851 | TGCACATTTG GGATCTAGTA TTGGGATATT TTTAGTCCGT GATAAAGAGG |
| 1901 | AATTACAAGA AAAGATCTCA GAAGCATTTC TATATGACAC GGATGTGTTT |
| 1951 | GTGGAGGAAA GTCGCTTAGG GTCTCGTGAA ATCGAAGTGT CCTGTATCGG |
| 2001 | CCATTCTTCT AGCTGGTATT GTATGGCAGG GCCTAATGAA CGCTGTGGTG |
| 2051 | CTAGTGGGTT TATTOATTAT CAAGAGAAAT ATGGATTTGA TGGCATAGAT |
| 2101 | TGCGCAAAGA TCTCTTTTGA TTTACAGCTC TCACAAGAAT CTTTAGATTG |
| 2151 | TGTTAGAGAA CTTGCAGAGC GTGTCTACCG AGCAATGCAA GGAAAAGGTT |
| 2201 | CAGCTCGAAT AGATTTTTTC TTGGATGAAG AGGGGAATTA TTGGTTGTCA |
| 2251 | GAGGTCAATC CTATTCCAGG AATGACAGCA GCTAGCCCAT TTTTACAAGC |
| 2301 | TTTTGTTCAC GCAGGATGGA CGCAAGAACA AATTGTAGAT CACTTTATTA |
| 2351 | TAGATGCTCT ACATAAGTTT GATAAGCAGC AGACTATCGA ACAGGCATTC |
| 2401 | ACTAAAGAAC AAGATTTAGT TAAAAGATAA |

[0836] The PSORT algorithm predicts inner membrane (0.16).

[0837] The protein was expressed in E. coli and purified as a his-tag product (FIG. 85A). The recombinant protein was used to immunise mice, whose sera were used in a Western blot (FIG. 85B) and for FACS analysis.

[0838] These experiments show that cp7225 is a surface-exposed and immunoaccessible protein, and that it is a useful immunogen. These properties are not evident from the sequence alone.

### Example 86

[0839] The following C. pneumoniae protein (PID 4377248) was expressed <SEQ ID 171; cp7248>:

| | |
|---|---|
| 1 | MKFWLQGCAF VGCLLLTLPC CAARRRASGE NLQQTRPIAA ANLQWESYAE |
| 51 | ALEHSKQDHK PICLFFTGSD WCMWCIKMQD QILQSSEFKH FAGVHLHMVE |
| 101 | VDFPQKNHQP EEQRQKNQEL KAQYKVTGFP ELVFIDAEGK QLARMGFEPG |
| 151 | GGAAYVSKVK SALKLR* |

[0840] A predicted signal peptide is highlighted.

[0841] The cp7248 nucleotide sequence <SEQ ID 172> is:

| | |
|---|---|
| 51 | TTTACCTTGT TGTGCTGCAC GAAGACGTGC TTCTGGAGAA AATTTGCAAC |
| 101 | AAACTCGTCC TATAGCAGCT GCAAATCTAC AATGGGAGAG CTATGCAGAA |
| 151 | GCTCTTGAAC ATTCTAAACA AGATCACAAA CCTATTTGTC TTTTCTTTAC |
| 201 | AGGATCAGAC TGGTGTATGT GGTGCATAAA AATGCAAGAC CAGATTTTGC |
| 251 | AAAGCTCTGA GTTTAAGCAT TTTGCGGGTG TGCATCTGCA TATGGTTGAA |
| 301 | GTTGATTTCC CCCAAAAGAA TCATCAACCT GAAGAGCAGC GCCAAAAAAA |
| 351 | TCAAGAACTG AAAGCTCAAT ATAAAGTTAC AGGATTCCCC GAACTGGTCT |
| 401 | TCATAGATGC AGAAGGAAAA CAGCTTGCTC GCATGGGATT TGAGCCTGGT |
| 451 | GGTGGAGCTG CTTACGTAAG CAAGGTGAAG TCTGCTCTTA AACTACGTTA |
| 501 | A |

[0842] The PSORT algorithm predicts periplasmic (0.932).

[0843] The protein was expressed in E. coli and purified as a GST-fusion product (FIG. 86A) and also in his-tagged form. The recombinant proteins were used to immunise mice, whose sera were used in a Western blot (FIG. 86B) and for FACS analysis.

[0844] The cp7248 protein was also identified in the 2D-PAGE experiment.

[0845] These experiments show that cp7248 is a surface-exposed and immunoaccessible protein, and that it is a useful immunogen. These properties are not evident from the sequence alone.

### Example 87

[0846] The following C. pneumoniae protein (PID 4377249) was expressed <SEQ ID 173; cp7249>:

| | |
|---|---|
| 1 | MIPSPTPINF RDDTILETDP KPSLIMFSSR KTEIASERRK AHPTLFKVLG |
| 51 | TIWNIVKFII SIILFLPLAL LWVLKKTCQF FILPSSIISQ SMSKTAVAIR |
| 101 | RMTPLSHIKQ LLSLKEISAA DRVVIQYDDL VVDSLAIKIP HALPHRWILY |
| 151 | SQGNSGLMEN LFDRGDSSLH QLAKATGSNL LVFNYPGIMS SKGEAKRENL |
| 201 | VKSYQACVRY LRDEETGPKA NQIIAFGYSL GTSVQAAALD REVTDGSDGT |
| 251 | SWIVVKDRGP RSLADVANQI CKPIASAIIK LVGWNIDSVK PSERLRCPEI |
| 301 | FIYNSNHDQE LISDGLFERE NCVATPFLEL PEVKTSGTKI PIPERDLLHL |
| 351 | NPLSPNVVDR LAAVISNYLD SENRKSQQPD * |

[0847] The cp7249 nucleotide sequence <SEQ ID 174> is:

| | |
|---|---|
| 1 | ATGATCCCAT CCCCTACCCC AATAAACTTT CGTGATGATA CGATTCTAGA |
| 51 | GACGGATCCA AAGCCGTCTT TAATCATGTT CTCTTCAAAA AAAACAGAGA |
| 101 | TAGCTTCTGA AAGACGGAAG GCCCATCCCA CCTTATTTAA AGTTCTAGGA |
| 151 | ACGATTTGGA ATATTGTGAA GTTTATTATC TCAATCATTC TGTTCCTTCC |
| 201 | CTTAGCGTPA TTGTGGGTAC TCAAGAAAAC CTGTCAGTTT TTCATTCTCC |
| 251 | CATCTTCTAT CATATCTCAG AGCATGTCAA AAACAGCTGT GGCAATTCGG |
| 301 | CGAATGACCT TTCTGTCCCA TATTAAACAA CTCCTAAGCC TTAAGGAAAT |
| 351 | CTCAGCTGCC GATCGTGTGG TTATACAATA TGACGATTTG GTGGTTGATA |
| 401 | GCTTAGCTAT AAAGATACCT CATGCTCTTC CCCACAGGTG GATTCTTTAT |
| 451 | TCTCAAGGAA ACTCTGGATT GATGGAAAAC CTGTTCGATC GGGGCGATTC |
| 501 | CTCTCTACAC CAGCTAGCCA AAGCAACCGG CTCGAATCTT CTTGTGTTCA |
| 551 | ACTATCCTGG AATTATGTCC AGCAAAGGAG AAGCGAAACG AGAAAATCTG |
| 601 | GTTAAATCGT ATCAGGCATG CGTACGCTAC CTACGAGATG AAGAGACAGG |
| 651 | TCCTAAAGCC AATCAAATCA TAGCTTTCGG ATACTCTTTG GGAACTAGTG |
| 701 | TCCAAGCTGC TGCTCTAGAT CGTGAGCTCA CTOATGGCAG TGATGGAACT |
| 751 | TCATGGATTG TTGTAAAAGA TCGGGGCCCT CGCTCTCTAG CAGATGTCGC |
| 801 | GAATCAAATT TGTAAGCCCA TAGCTTCCGC GATTATAAAA CTCGTTGGTT |
| 851 | GGAACATAGA CTCTGTCAAA CCTAGCGAAA GATTGCGTTG TCCCGAAATT |
| 901 | TTCATTTACA ACTCTAATCA TGATCAAGAA CTCATTAGCG ACGGCCTCTT |
| 951 | CGAAAGAGAA AATTGCGTAG CAACACCTTT TCTAGAGCTT CCTGAAGTAA |
| 1001 | AAACCTCGGG GACTAAAATT CCTATACCCG AAAGGGATCT TCTCCATCTA |
| 1051 | AATCCTCTCA GTCCAAATGT AGTAGACAGA TTAGCAGCAG TGATCTCTAA |
| 1101 | TTATTTAGAT TCTGAAAACA GAAAGTCTCA GCAACCTGAT TAA |

[0848] The PSORT algorithm predicts inner membrane (0.571).

[0849] The protein was expressed in E. coli and purified as a GST-fusion product (FIG. 87A). The recombinant protein was used to immunise mice, whose sera were used in a Western blot (FIG. 87B) and for FACS analysis.

[0850] These experiments show that cp7249 is a surface-exposed and immunoaccessible protein, and that it is a useful immunogen. These properties are not evident from the sequence alone.

### Example 88

[0851] The following C. pneumoniae protein (PID 4377261) was expressed <SEQ ID 175; cp7261>:

| | |
|---|---|
| 1 | MLPISILLFY VILGCLSAYI ADKKKRNVIG WFFAGAFFGF IGLVVLLLLP |
| 51 | SRRNALEKPQ NDPFDNSDLF DDLKKSLAGN DEIPSSGDLQ EIVIDTEKWF |
| 101 | YLNKDRENVG PISFEELVVL LKGKTYPEEI WVWKKGMKDW QRVKDVPSLQ |
| 151 | QALKEASK* |

[0852] The cp7261 nucleotide sequence <SEQ ID 176> is:

| | |
|---|---|
| 1 | ATGCTCCCTA TTTCGATTTT ATTATTTTAT GTGATTCTAG GTTGTCTATC |
| 51 | TGCCTACATA GCAGATAAGA AAAAACGAAA TGTTATTGGC TGGTTTTTTG |
| 101 | CAGGAGCATT TTTTTCATTT ATTGGTCTAG TTGTCCTTCT TCTTCTTCCT |
| 151 | TCTCGTCGAA ACGCTTTAGA AAAGCCACAA AACGATCCTT TTGATAACTC |
| 201 | CGATCTTTTT GATGATTTGA AAAAAAGTTT AGCAGGTAAT GACGAGATAC |
| 251 | CCTCATCGGG AGATCTTCAA GAAATCGTTA TCGATACAGA GAAGTGGTTT |
| 301 | TATTTAAATA AAGATAGAGA AAACGTAGGT CCGATATCTT TTGAGGAGTT |
| 351 | GGTCGTACTT TTAAAGGGAA AAACGTATCC AGAAGAAATT TGGGTATGGA |
| 401 | AAAAGGGAAT GAAAGATTGG CAACGAGTGA AGGATGTTCC ATCACTACAA |
| 451 | CAGGCTTTGA AAGAAGCATC AAAATAA |

[0853] The PSORT algorithm predicts inner membrane (0.848).

[0854] The protein was expressed in E. coli and purified as a GST-fusion product (FIG. 88A). The recombinant protein was used to immunise mice, whose sera were used in a Western blot (FIG. 88B) and for FACS analysis.

[0855] These experiments show that cp7261 is a surface-exposed and immunoaccessible protein, and that it is a useful immunogen. These properties are not evident from the sequence alone.

### Example 89

[0856] The following C. pneumoniae protein (PID 4377305) was expressed <SEQ ID 177; cp7305>:

| | |
|---|---|
| 1 | MEVYSFHPAV RTSFQHRVMA ALDAWFFLGG HRLKVVSLDS CNSGWAYQEL |
| 51 | VSISTTEKVL KLLSYLLVPI VIIALLIRCL LHSNFRIDVE KERWLKIREL |
| 101 | GIDIESCKLP SSYVNQVSSF IWFEKDKSKR PRIDVDYHTL HSKDWVVFPI |
| 151 | VFQKIPKTSR FSYWFSQKET RKRDYVRNML DHVIGYLTSE GGEWLQYISK |
| 201 | TSYQSATSLD PERVLQYCLT DNQELQGEVQ RLLNEESATK SSGDKEVLLS |
| 251 | HVSDIICQCW WPKFLEVIQS PAFIEELVEE VSGKLNLDFL CLEKANTLDQ |
| 301 | ELRNSLLRAV VHHGSEGVDI KKVGAGLIIY TEAIQLQIPF SRS* |

[0857] The cp7305 nucleotide sequence <SEQ ID 178> is:

| | |
|---|---|
| 1 | ATGGAAGTTT ATAGTTTTCA CCCTGCGGTA AGGACTTCGT TTCAGCACCG |
| 51 | TGTAATGGCA GCACTAGATG CTTGGTTTTT TCTAGGAGGG CACCGTTTAA |
| 101 | AAGTAGTTTC TCTAGATAGT TGTAACTCAG GTTGGGCGTA TCAAGAACTT |
| 151 | GTGTCTATTT CAACGACAGA AAAAGTCTTG AAACTACTCT CTTACCTACT |
| 201 | CGTACCGATT GTCATAATAG CTCTGTTAAT TCGTTGTCTT TTACATAGCA |
| 251 | ATTTTAGGAT AGACGTAGAG AAGGAACGTT GGTTAAAAAT AAGGGAGTTA |
| 301 | GGAATTGATA TAGAAAGCTG CAAACTCCCC AGTTCTTATG TAAACCAGGT |
| 351 | TTCCTCGTTT ATTTGGTTTG AAAAAGATAA ATCCAAACGG CCACGTATTG |
| 401 | ATCTAGATTA TCATACGCTA CATAGCAAAG ACTGGGTAGT TTTCCCTATC |
| 451 | GTTTTTCAGA AAATTCCAAA GACCTCGCGT TTCAGTTATT GGTTCTCACA |
| 501 | AAAAGAAACA AGGAAGACGG ATTATGTGAG AAATATGCTG GACCACGTCA |
| 551 | TTGGTTATCT AACGTCAGAA GGTGGGGAGT GGTTGCAGTA TATATCGAAA |
| 601 | ACCTCTTATC AAAGCGCTAC TTCCTTGGAT CCTGAAAGAG TTCTTCAATA |
| 651 | TTGCTTAACT GATAACCAGG AGCTCCAGGG AGAAGTGCAA CGTTTGCTTA |
| 701 | ATGAGGAGAG TGCGACCAAA AGCTCTGGGG ATAAGGAAGT TTTGTTAAGT |
| 751 | CATGTATCTG ACATTATTTG CCAGTGTTGG TGGCCAAAGT TTCTTGAAGT |
| 801 | TATACAATCT CCGGCCTTTA TTGAAGAATT AGTAGAAGAA GTGAGTGGTA |
| 851 | AACTTAATTT AGATTTTTTA TGCCTAGAAA AGGCTAATAC ATTAGATCAG |
| 901 | GAGTTGAGAA ACAGTCTTCT AAGAGCAGTC GTACACCACG GTTCTGAAGG |
| 951 | AGTTGATATT AAGAAAGTTG GTGCCGGCCT CATTATTTAT ACGGAAGCTA |
| 1001 | TTCAATTACA GATTCCCTTC TCAAGGAGTT AA |

[0858] The PSORT algorithm predicts inner membrane (0.508).

[0859] The protein was expressed in E. coli and purified as a GST-fusion product (FIG. 89A) and also as a double GST/his fusion. The recombinant proteins were used to immunise mice, whose sera were used in a Western blot (FIG. 89B) and for FACS analysis.

[0860] These experiments show that cp7305 is a surface-exposed and immunoaccessible protein, and that it is a useful immunogen. These properties are not evident from the sequence alone.

### Example 90

[0861] The following C. pneumoniae protein (PID 4377347) was expressed <SEQ ID 179; cp7347>:

| | |
|---|---|
| 1 | MKKGKLGAIV FGLLFTSSVA GFSKDLTKDN AYQDLNVIEH LISLKYAPLP |
| 51 | WKELLFGWDL SQQTQQARLQ LVLEEKPTTN YCQKVLSNYV RSLNDYHAGI |
| 101 | TFYRTESAYI PYVLKLSEDG HVFVVDVQTS QGDIYLGDEI LEVDGMGIRE |
| 151 | AIESLRFGRG SATDYSAAVR SLTSRSAAFG DAVPSGIAML KLRRPSGLIR |
| 201 | STPVRWRYTP EHIGDFSLVA PLIPEHKPQL PTQSCVLFRS GVNSQSSSSS |
| 251 | LFSSYMVPYF WEELRVQNKQ RFDSNHHIGS RNGFLPTFGP ILWEQDKGPY |
| 301 | RSYIFKAKDS QGNPHRIGFL RISSYVWTDL EGLEEDHKDS PWELFGEIID |
| 351 | HLEKETDALI IDQTHNPGGS VFYLYSLLSM LTDHPLDTPK HRMIFTQDEV |
| 401 | SSALHWQDLL EDVFTDEQAV AVLGETMEGY CMDMHAVASL QNFSQSVLSS |
| 451 | WVSGDINLSK PMPLLGFAQV RPHPKHQYTK PLFMLIDEDD FSCGDLAPAI |
| 501 | LKDNGRATLI GKPTAGAGGF VFQVTFPNRS GIKGLSLTGS LAVRKDGEFI |
| 551 | ENLGVAPHID LGFTSRDLQT SRFTDYVEAV KTIVLTSLSE NAKKSEEQTS |
| 601 | PQETPEVIRV SYPTTTSAS* |

[0862] A predicted signal peptide is highlighted.

[0863] The cp7347 nucleotide sequence <SEQ ID 180> is:

| | |
|---|---|
| 1 | ATGAAAAAAG GGAAATTAGG AGCCATAGTT TTTGGCCTTC TATTTACAAG |
| 51 | TAGTGTTGCT GGTTTTTCTA AGGATTTGAC TAAAGACAAC GCTTATCAAG |
| 101 | ATTTAAATGT CATAGAGCAT TTAATATCGT TAAAATATGC TCCTTTACCA |
| 151 | TGGAAGGAAC TATTATTTGG TTGGGATTTA TCTCAGCAAA CACAGCAAGC |
| 201 | TCGCTTGCAA CTGGTCTTAG AAGAAAAACC AACAACCAAC TACTGCCAGA |
| 251 | AGGTACTCTC TAACTACGTG AGATCATTAA ACGATTATCA TGCAGGGATT |
| 301 | ACGTTTTATC GTACTGAAAG TGCGTATATC CCTTACGTAT TGAAGTTAAG |
| 351 | TGAAGATGGT CATGTCTTTG TAGTCGACGT ACAGACTAGC CAAGGGGATA |
| 401 | TTTACTTAGG GGATGAAATC CTTGAAGTAG ATGGAATGGG GATTCGTGAG |
| 451 | GCTATCGAAA GCCTTCGCTT TGGACGAGGG AGTGCCACAG ACTATTCTGC |
| 501 | TGCAGTTCGT TCCTTGACAT CGCGTTCCGC CGCTTTTGGA GATGCGGTTC |
| 551 | CTTCAGGAAT TGCCATGTTG AAACTTCGCC GACCCAGTGG TTTGATCCGT |
| 601 | TCGACACCGG TCCGTTGGCG TTATACTCCA GAGCATATCG GAGATTTTTC |
| 651 | TTTAGTTGCT CCTTTGATTG CTGAACATAA ACCTCAATTA CCTACACAAA |
| 701 | GTTGTGTGCT ATTCCGTTCC GGGGTAAATT CACAGTCTTC TAGTAGCTCT |
| 751 | TTATTCAGTT CCTACATGGT GCCTTATTTC TGGGAAGAAT TGCGGGTTCA |
| 801 | AAATAAGCAG CGTTTTGACA GTAATCACCA TATAGGGAGC CGTAATGGAT |
| 851 | TTTTACCTAC GTTTGGTCCT ATTCTTTGGG AACAAGACAA GGGGCCCTAT |
| 901 | CGTTCCTATA TCTTTAAAGC AAAAGATTCT CAGGGCAATC CCCATCGCAT |
| 951 | AGGATTTTTA AGAATTTCTT CTTATGTTTG GACTGATTTA GAAGGACTTG |
| 1001 | AAGAGGATCA TAAGGATAGT CCTTGGGAGC TCTTTGGAGA GATCATCGAT |
| 1051 | CATTTGGAAA AAGAGACTGA TGCTTTGATT ATTGATCAGA CCCATAATCC |
| 1101 | TGGAGGCAGT GTTTTCTATC TCTATTCGTT ACTATCTATG TTAACAGATC |
| 1151 | ATCCTTTAGA TACTCCTAAA CATAGAATGA TTTTCACTCA GGATGAAGTC |
| 1201 | AGCTCCGCTT TGCACTGGCA AGATCTACTA GAAGATGTCT TCACAGATGA |
| 1251 | GCAGGCAGTT GCCGTGCTAG GGGAAACTAT GGAAGGATAT TGCATGGATA |
| 1301 | TGCATGCTGT AGCCTCTCTT CAAAACTTCT CTCAGAQTGT CCTTTCTTCC |
| 1351 | TGGGTTTCAG GTGATATTAA CCTTTCAAAA CCTATGCCTT TGCTAGGATT |
| 1401 | TGCACAGGTT CGACCTCATC CTAAACATCA ATATACTAAA CCTTTGTTTA |
| 1451 | TGTTGATAGA CGAGGATGAC TTCTCTTGTG GAGATTTAGC GCCTGCAATT |
| 1501 | TTGAAGGATA ATGGCCGCGC TACTCTCATT GGAAAGCCAA CAGCAGGAGC |
| 1551 | TGGAGGTTTT GTATTCCAAG TCACTTTCCC TAACCGTTCT GGAATTAAAG |
| 1601 | GTCTTTCTTT AACAGGATCT TTAGCTGTTA GGAAAGATGG TGAGTTTATT |
| 1651 | GAAAACTTAG GAGTGGCTCC TCATATTGAT TTAGGATTTA CCTCCAGGGA |
| 1701 | TTTGCAAACT TCCAGGTTTA CTGATTACGT TGAGGCAGTG AAAACTATAG |
| 1751 | TTTTAACTTC TTTGTCTGAG AACGCTAAGA AGAGTGAAGA GCAGACTTCT |
| 1801 | CCGCAAGAGA CGCCTGAAGT TATTCGAGTC TCTTATCCCA CAACGACTTC |
| 1851 | TGCTTCGTAA |

[0864] The PSORT algorithm predicts periplasmic space (0.2497).

[0865] The protein was expressed in E. coli and purified as a GST-fusion product (FIG. 90A) and also in his-tagged form. The recombinant proteins were used to immunise nice, whose sera were used in a Western blot (FIG. 90B) and for FACS analysis.

[0866] These experiments show that cp7347 is a surface-exposed and immunoaccessible protein, and that it is a useful immunogen. These properties are not evident from the sequence alone.

### Example 91

[0867] The following C. pneumoniae protein (PID 4377353) was expressed <SEQ ID 181; cp7353>:

| | |
|---|---|
| 1 | MNMPVPSAVP SANITLKEDS STVSTASGIL KTATGEVLVS CTALEGSSST |
| 51 | DALISLALGQ IILATQQELL LQSTNVHQLL FLPPEVVELE IQVVDLLVQL |
| 101 | EHAETITSEP QETQTQSRSE QTLPQQSSSK QSALSPRSLK PEISDSKQQQ |
| 151 | ALQTPKDSAV RKHSEAPSPE TQARASLSQA SSSSQRSLPP QESAPERTLL |
| 201 | EQQKASSFSP LSQFSAEKQK EALTTSRSHE LYKERDQDRQ QREQHDRKHD |
| 251 | QEEDAESKKK KKKRGLQVEA VAEEPGENLD IAALIFSDQM RPPAEETSKK |
| 301 | ETTFKKKLPS PMSVFSRFIP SKNPLSVGSS IHGPIQTPKV ENVFLRFMKL |
| 351 | MARILGQAEA EANELYMRVK QRTDDVDTLT VLISKINNEK KDIDWSENEE |
| 401 | MKALLNRAKE IGVTIDKEKY TWTEEEKRLL KENVQMRKEN MEKITQMERT |
| 451 | DMQRHLQEIS QCHQARSNVL KLLKELMDTF IYNLRP* |

[0868] The cp7353 nucleotide sequence <SEQ ID 182> is:

| | |
|---|---|
| 1 | ATGAATATGC CTGTTCCTTC TGCAGTTCCC TCTGCAAATA TAACTCTAAA |
| 51 | AGAAGACAGC TCAACAGTTT CCACAGCCTC TGGAATATTA AAGACTGCAA |
| 101 | CAGGTGAAGT CTTAGTCTCT TGTACAGCGC TAGAAGGAAG CTCTTCTACA |
| 151 | GATGCTTTAA TTAGCTTAGC TTTAGGACAA ATCATTCTTG CGACCCAACA |
| 201 | AGAACTGCTC TTACAAAGCA CAAATGTTCA TCAACTCCTC TTCCTCCCTC |
| 251 | CTGAAGTTGT AGAATTAGAA ATCCAAGTTG TTGACTTGCT AGTGCAATTG |
| 301 | GAACATGCAG AGACAATCAC AAGTGAACCA CAAGAAACAC AAACGCAAAG |
| 351 | TAGGAGTGAG CAGACCCTCC CTCAACAAAG CAGCAGTAAA CAATCTGCTC |
| 401 | TCTCCCCACG CTCCTTAAAA CCTGAAATTT CTGATTCTAA ACAACAGCAA |
| 451 | GCTCTTCAAA CACCAAAAGA CTCTGCTGTA AGAAAACACA GCGAAGCACC |
| 501 | GTCACCTGAG ACACAAGCTC GCGCTTCCTT ATCTCAGGCA AGCTCAAGTT |
| 551 | CTCAGAGATC CTTACCTCCG CAAGAAAGTG CGCCAGAAAG AACACTATTA |
| 601 | GAACAACAAA AAGCAAGCTC CTTCTCTCCT CTATCCCAGT TCTCTGCAGA |
| 651 | GAAACAAAAA GAGGCCCTGA CGACCTCAAA ATCTCATGAA CTCTATAAAG |
| 701 | AACGCGATCA AGATCGCCAA CAAAGAGAGC AGCACGACAG AAAGCACGAT |
| 751 | CAGGAAGAAG ACGCTGAATC TAAAAAGAAA AAGAAGAAAC GTGGTCTCGG |
| 801 | TGTAGAGGCA GTCGCTGAGG AACCCGGAGA AAATCTAGAT ATTGCCGCTT |
| 851 | TAATCTTCTC AGATCAAATG CGACCTCCTG CTGAAGAAAC TTCTAAAAAA |
| 901 | GAAACGACAT TCAAAAAGAA GCTACCTTCT CCAATGTCTG TGTTTAGCAG |
| 951 | ATTCATCCCT AGTAAGAATC CGTTATCTGT AGGCTCTTCA ATACACGGGC |
| 1001 | CTATACAAAC TCCAAAAGTA GAAAATGTGT TCTTAAGGTT CATGAAGCTC |
| 1051 | ATGGCAAGAA TCTTAGGCCA AGCCGAAGCC GAAGCTAATG AACTCTACAT |
| 1101 | GCGAGTCAAA CAACGTACCG ATGATGTAGA CACACTCACA GTCCTTATCT |
| 1151 | CTAAGATCAA TAATGAAAAG AAAGACATTG ATTGGAGTGA AAATGAAGAG |
| 1201 | ATGAAAGCTC TTTTAAATCG AGCTAAAGAG ATTGGAGTCA CTATAGACAA |
| 1251 | AGAAAAATAT ACTTGGACAG AAGAGGAAAA AAGACTTCTA AAAGAGAATG |
| 1301 | TCCAAATGCG CAAAGAGAAT ATGGAGAAAA TCACTCAAAT GGAAAGGACG |
| 1351 | GACATGCAAA GGCACCTCCA AGAGATTTCT CAATGTCATC AAGCGCGCTC |
| 1401 | TAATGTATTG AAGTTATTGA AAGAACTTAT GGACACCTTC ATTTACAACC |
| 1451 | TACGCCCCTA A |

[0869] The PSORT algorithm predicts cytoplasm (0.1308).

[0870] The protein was expressed in E. coli and purified as a GST-fusion product (FIG. 91A). The recombinant protein was used to immunise mice, whose sera were used in a Western blot (FIG. 91B) and for FACS analysis.

[0871] These experiments show that cp7353 is a surface-exposed and immunoaccessible protein, and that it is a useful immunogen. These properties are not evident from the sequence alone.

### Example 92

[0872] The following C. pneumoniae protein (PID 4377408) was expressed <SEQ ID 183; cp7408>:

| | |
|---|---|
| 1 | MLKIQKKRMC VSVVITVGAI VGFFNSADAA PKKKKIPIQI LYSFTKVSSY |
| 51 | LKNEDASTIF CVDVDRGLLQ HRYLGSPGWQ ETRRRQLFKS LENQSYGNER |
| 101 | LGEETLAIDI FRNKECLESE IPEQMEAILA NSSALVLGIS SFGITGIPAT |
| 151 | LHSLLRQNLS FQKRSIASES FLLKIDSAPS DASVFYKGVL FRGETAIVDA |
| 201 | LSQLFAQLDL SPKKIIFLGE DPEVVQAVGS ACIGWGMNFL GLVYYPAQES |
| 251 | LFSYVHPYST ATELQEAQGL QVISDEVAQL TLNALPKMN* |

[0873] The cp7408 nucleotide sequence <SEQ ID 184> is:

| | |
|---|---|
| 1 | ATGTTGAAAA TCCAGAAAAA AAGAATGTGT GTCAGCGTAG TCATCACGGT |
| 51 | AGGCGCCATA GTGGGGTTTT TCAATTCTGC AGACGCAGCA CCAAAGAAAA |
| 101 | AGAAGATCCC TATACAGATT CTCTACTCCT TTACTAAAGT CTCTTCCTAT |
| 151 | TTAAAAAACG AAGACGCAAG TACTATATTT TGCGTCGATG TGGATCGTGG |
| 201 | ACTTCTCCAG CATCGGTATT TAGGTAGTCC AGGATGGCAG GAAACCAGAC |
| 251 | GTCGGCAGTT ATTTAAATCC TTAGAAAATC AATCATACGG CAACGAACGT |
| 301 | TTAGGAGAAG AAACTCTTGC TATTGATATT TTCAGGAACA AAGAGTGCTT |
| 351 | GGAGAGCGAG ATCCCAGAGC AGATGGAAGC TATCCTTGCA AATTCCTCGG |
| 401 | CCTTGGTCTT AGGCATCTCT TCTTTTGGGA TCACAGGAAT TCCTGCGACT |
| 451 | TTGCATAGTT TGCTTCGACA GAATCTATCT TTCCAAAAAC GCTCTATAGC |
| 501 | ATCGGAGAGC TTCCTTTTAA AGATCGATAG TGCCCCCTCA GATGCCTCTG |
| 551 | TTTTTTATAA AGGCGTGCTT TTCCGCGGAG AGACTGCGAT CGTGGATGCG |
| 601 | TTAAGCCAAT TATTTGCCCA GCTCGATCTT TCTCCTAAAA AAATTATCTT |
| 651 | TCTAGGAGAA GACCCTGAGG TCGTTCAAGC TGTTGGGTCT GCTTGTATAG |
| 701 | GTTGGGGCAT GAACTTTTVA GGCCTGGTAT ACTATCCTGC TCAAGAAAGC |
| 751 | CTTTTTTCTT ATGTTCATCC TTACTCTACA GCAACGGAGC TCCAAGAAGC |
| 801 | ACAGGGTTTA CAAGTAATTT CAGATGAAGT CGCACAGCTT ACTTTAAACG |
| 851 | CTCTTCCGAA AATGAATTAA |

[0874] The PSORT algorithm predicts inner membrane (0.123).

[0875] The protein was expressed in E. coli and purified as a his-tag product (FIG. 92A). The recombinant protein was used to immunise mice, whose sera were used in a Western blot (FIG. 92B) and for FACS analysis.

[0876] These experiments show that cp7408 is a surface-exposed and immunoaccessible protein, and that it is a useful immunogen. These properties are not evident from the sequence alone.

### Example 93

[0877] The following C. pneumoniae protein (PID 4376444) was expressed <SEQ ID 185; cp6424>:

| | |
|---|---|
| 1 | MMHNIVVLSE EPGRSAFLGR TAFFPNKYPI AQGGVGIPST IGNLFTIWYC |
| 51 | FYFYRAATPQ SDHPDGCGFI LLERLKELGA GFFYCDLRES NTTGFTDFFE |
| 101 | GSNKGVLKNH LFIRDE* |

[0878] The cp6424 nucleotide sequence <SEQ ID 186> is:

| | |
|---|---|
| 1 | ATGATGCACA ATATTGTTGT TCTTAGTGAG GAACCTGGAC GAAGCGCTTT |
| 51 | TCTTGGTAGG ACGGCATTTT TCCCTAATAA GTATCCAATA GCTCAGGGTG |
| 101 | GTGTTGGAAT ACCATCTACA ATAGGCAATC TCTTTACTAT ATGGTACTGT |
| 151 | TTCTATTTTT ATAGAGCTGC AACTCCACAA TCTGATCATC CTGACGGATG |
| 201 | TGGCTTTATT CTACTAGAAA GGCTTAAGGA GCTCGGTGCA GGGTTCTTTT |
| 251 | ATTGTGATCT TCGTGAGTCC AATACCACTG GCTTTACTCT TTTTTTTGAA |
| 301 | GGCTCCAATA AAGGTGTGTT AAAGAATCAC TTGTTTATTA GAGATGAGTA |
| 351 | A |

[0879] The PSORT algorithm predicts cytoplasm (0.2502).

[0880] The protein was expressed in E. coli and purified as a GST-fusion product (FIG. 93A) and also in his-tagged form. The recombinant proteins were used to immunise mice, whose sera were used in Western blots (FIG. 93B) and for FACS analyses (FIG. 93C; GST-fusion).

[0881] These experiments show that cp6424 is a surface-exposed and immunoaccessible protein, and that it is a useful immunogen. These properties are not evident from the sequence alone.

### Example 94

[0882] The following C. pneumoniae protein (PID 4376449) was expressed <SEQ ID 187; cp6449>:

| | |
|---|---|
| 1 | VASETYPSQI LHAQREVRDA YFNQADCHPA RANQILEAKK ICLLDVYHTN |
| 51 | HYSVFTFCVD NYPNLRFTFV SSKNNEMNGL SNPLDNVLVE AMVRRTHARN |
| 101 | LLAACKIRNI EVPRVVGLDL RSGILISRLE LKQPQFQSLT EDFVNHSTNQ |
| 151 | EEARVHQKHV LLISLILLCK QAVLESFQEK KRSS* |

[0883] The cp6449 nucleotide sequence <SEQ ID 188> is:

| | |
|---|---|
| 1 | GTGGCGTCTG AAACGTATCC TTCTCAGATA TTGCACGCTC AGAGGGAAGT |
| 51 | ACGTGATGCC TATTTTAATC AAGCGGATTG CCATCCTGCT CGGGCTAATC |
| 101 | AGATTCTCGA GGCTAAGAAA ATCTGTTTAT TAGATGTTTA TCATACTAAT |
| 151 | CATTATTCCG TATTTACTTT TTGTGTAGAT AATTATCCGA ATCTCCGCTT |
| 201 TACATTTTGTA TCTTCAAAAA ACAATGAGAT GAATGGCTTA TCTAATCCTC | |
| 251 | TAGATAATGT TCTTGTAGAG GCTATGGTAC GTAGAACACA TGCAAGAAAC |
| 301 | CTACTTGCAG CGTGTAAAAT TCGAAATATT GAGGTTCCAA GGGTTGTTGG |
| 351 | GCTTGACCTA AGATCTGGGA TACTCATTTC GAAACTAGAA TTGAAGCAAC |
| 401 | CTCAGTTCCA AAGTTTAACA GAAGACTTCG TAAATCATTC CACAAATCAG |
| 451 | GAAGAAGCTC GCGTCCATCA AAAGCATGTG TTGCTAATTT CTTTAATTTT |
| 501 | ACTTTGCAAC CAGGCCGTTC TGGAATCATT CCAGGAAAAA AAGCGATCCT |
| 551 | CTTAA |

[0884] The PSORT algorithm predicts inner membrane (0.2084).

[0885] The protein was expressed in E. coli and purified as a GST-fusion product (FIG. 94A) and also in his-tagged form. The recombinant proteins were used to immunise mice, whose sera were used in Western blots (FIG. 94B) and for FACS analyses (FIG. 94C; GST-fusion).

[0886] These experiments show that cp6449 is a surface-exposed and immunoaccessible protein, and that it is a useful immunogen. These properties are not evident from the sequence alone.

### Example 95

[0887] The following C. pneumoniae protein (PID 4376495) was expressed <SEQ ID 189; cp6495>:

MRELNAFELTQPEEYRNRWVLMPCLKCRFCRTQHAKVWSYRCVHEASLYE
KNCFLTLTYDDKHLPQYGSLVKLHLQLFLKRLRKMISPHKIRYFECGAYG
TKLQRPHYHLLLS

[0888] The cp6495 nucleotide sequence <SEQ ID 190> is:

TTGCGAGAATTAAATGCTTTTGAATTAACTCAACCTGAAGAGTATCGAAACCGTTGGGTTTTGATGCCTTGTCTTAAGTGT
CGTTTTTGTAGAACGCAACATGCAAAAGTCTGGTCTTATCGTTGTGTCCATGAAGCTTCTTTGTATGAGAAAAATTGTTTT
CTTACTTTGACTTATGATGATAAGCATTTACCTCAGTATGGTTCGTTGGTAAAGCTGCATTTACAGCTGTTTCTTAAGAGA
TTAAGAAAGATGATTTCTCCTCATAAAATTCGTTATTTTGAATGTGGTGCGTATGGAACCAAATTACAAAGACCTCATTAT
CATCTACTTTTATCATGA

[0889] The PSORT algorithm predicts cytoplasmic (0.280).

[0890] The protein was expressed in E. coli and purified as a GST-fusion product (FIG. 95A). The recombinant protein was used to immunise mice, whose sera were used in a Western blot (FIG. 95B) and for FACS analysis (FIG. 95C).

[0891] These experiments show that cp6495 is a surface-expose and immunoaccessible protein, and that it is a useful immunogen. These properties are not evident from the sequence alone.

### Example 96

[0892] The following C. pneumoniae protein (PID 4376506) was expressed <SEQ ID 191; cp6506>:

| | |
|---|---|
| 1 | MRRFLFLILS SLPLVAFSAD NFTILEEKQS PLSRVSIIFA LPGVTPVSFD |
| 51 | GNCPIPWFSH SKKTLEGQRI YYSGDSFGKY FVVSALWPNK VSSAVVACNM |
| 101 | ILKHRVDLIL IIGSCYSRSQ DSRPGSVLVS KGYINYDADV RPFFERFEIP |
| 151 | DIKKSVFATS EVHREAILRG GEEFISTHKQ EIEELLKTHG YLKSTTKTEH |
| 201 | TLMEGLVATG ESFAMSRNYF LSLQKLYPEI HGFDSVSGAV SQVCYEYSIP |
| 251 | CLGVNILLPH PLESRSNEDW KHLQSEASKI YMDTLLKSVL KELCSSH* |

[0893] The cp6506 nucleotide sequence <SEQ ID 192> is:

| | |
|---|---|
| 1 | ATGCGTCGTT TTCTGTTTCT TATTCTTAGC TCTCTTCCTT TGGTCGCATT |
| 51 | CTCTGCTGAT AATTTPCACTA TTCTAGAAGA AAATCAGAGT CCTTTAAGTC |
| 101 | GTGTAAGTAT TATTTTTGCT TTACCTGGGG TTACTCCCGT TTCTTTTGAT |
| 151 | GGTAATTGTC CTATTCCTTG GTTTTCTCAT AGTAAAAAGA CTCTAGAGGG |
| 201 | ACAGAGAATT TATTACTCTG GCGACTCCTT TGGGAAATAC TTTGTAGTTT |
| 251 | CTGCTCTTTG GCCTAATTAA GTTTCTTCAG CTGTTGTGGC TTGTAATATG |
| 301 | ATTCTTAAAC ATCGAGTGGA TCTTATTCTA ATTATAGGCT CGTGTTACTC |
| 351 | TAGGTCTCAA GATAGCCGTT TTGGCAGCGT CTTAGTTTCT AAAGGCTACA |
| 401 | TTAATTATGA TGCAGATGTG AGGCCTTTCT TTGAAAGATT TGAGATTCCA |
| 451 | GACATTAAAA AGAGTGTTTT TGCAACCAGT GAGGTTCATC GGGAGGCAAT |
| 501 | TCTTCGTGGA GGCGAAGAGT TTATTTCTAC CCATAAACAA GAAATCGAAG |
| 551 | AGCTTTTGAA GACTCATGGG TATTTGAAAT CAACAACCAA AACGGAGCAC |
| 601 | ACCTTAATGG AAGGTTTGGT TGCTACAGGC GAGTCTTTCG CGATGTCGCG |
| 651 | AAACTATTTT CTTTCCTTAC AAAAATTGTA TCCAGAGATT CATGGTTTTG |
| 701 | ATAGTGTCAG CGGCGCTGTT TCTCAGGTAT GCTATGAATA TAGCATTCCT |
| 751 | TGTTTAGGTG TGAATATCCT TCTCCCTCAT CCTTTAGAAT CACGGAGTAA |
| 801 | CGAGGATTGG AAGCATCTTC AAAGTGAGGC AAGTAAAATT TATATGGATA |
| 851 | CCTTGCTCAA GAGTGTATTA AAAGAACTCT GTTCTTCTCA TTAA |

[0894] The PSORT algorithm predicts periplasmic spare (0.571).

[0895] The protein was expressed in E. coli and purified as his-tag (FIG. 96A) and GST-fusion (FIG. 96B) products. The GST-fusion protein was used to immunise mice, whose sera were used in a Western blot (FIG. 96C) and for FACS analysis (FIG. 96D)).

[0896] These experiments show that cp6506 is a surface-exposed and immunoaccessible protein, and that it is a useful immunogen. These properties are not evident from the sequence alone.

### Example 97

[0897] The following C. pneumoniae protein (PID 4376882) was expressed <SEQ ID 193; cp6882>:

| | |
|---|---|
| 1 | MSLLNLPSSQ DSASEDSTSQ SQIFDPIRNR ELVSTPEEKV RQRLLSFLMH |
| 51 | KLNYPKKLII IEKELKTLFP LLMRKGTLIP KRRPDILIIT PPTYTDAQGN |
| 101 | THNLGDPKPL LLIECKALAV NQNALKQLLS YNYSIGATCI AMAGKHSQVS |
| 151 | ALFNPKTQTL DFYPGLPEYS QLLNYFISLN L* |

[0898] The cp6882 nucleotide sequence <SEQ ID 194> is:

| | |
|---|---|
| 1 | ATGTCCTTAT TGAACCTTCC CTCAAGCCAG GATTCTGCAT CTGAGGACTC |
| 51 | CACATCGCAA TCTCAAATCT TCGATCCCAT TAGAAATCGG GAGTTAGTTT |
| 101 | CTACTCCCGA AGAAAAAGTC CGCCAAAGGT TGCTCTCCTT CCTAATGCAT |
| 151 | AAGCTGAACT ACCCTATGAA ACTCATCATC ATAGAAAAAG AACTCAAAAC |
| 201 | TCTTTTTCCT CTGCTTATGC GTAAAGGAAC CCTAATCCCA AAACGCCGCC |
| 251 | CAGATATTCT CATCATCACT CCCCCCACAT ACACAGACGC ACAGGGAAAC |
| 301 | ACTCACAACC TAGGCGACCC AAAACCCCTG CTACTTATCG AATGTAAGGC |
| 351 | CTTAGCCGTA AACCAAAATG CACTCAAACA ACTCCTTAGC TATAACTACT |
| 401 | CTATCGGAGC CACCTGCATT GCTATGGCAG GGAAACACTC TCAATTGTCA |
| 451 | GCTCTCTTCA ATCCAAAAAC ACAAACTCTT GATTTTTATC CTGGCCTCCC |
| 501 | AGAGTATTCC CAACTCCTAA ACTACTTTAT TTCTTTAAAC TTATAG |

[0899] The PSORT algorithm predicts cytoplasm (0.362).

[0900] The protein was expressed in E. coli and purified as a GST-fusion product (FIG. 97A). The protein was used to immunise mice, whose sera were used in a Western blot (FIG. 97B) and for FACS analysis (FIG. 97C).

[0901] These experiments show that cp6882 is a surface-exposed and immunoaccessible protein, and that it is a useful immunogen. These properties are not evident from the sequence alone.

### Example 98

[0902] The following C. pneumoniae protein (PID 4376979) was expressed <SEQ ID 195; cp6979>:

| | |
|---|---|
| 1 | MSVNPSGNSK NDLWITGAHD QHPDVKESGV TSANLGSHRV TASGGRQGLL |
| 51 | ARIKEAVTGF FSRMSFFRSG APRGSQQPSA PSADTVRSPL PGGDARATEG |
| 101 | AGRNLIKKGY QPGMKVTIPQ VPGGGAQRSS GSTTLKPTRP APPPPKTGGT |
| 151 | NAKRPATHGK GPAPQPPKTG GTNAKRAATH GKGPAPQPPK GILKQPGQSG |
| 201 | TSGKKRVSWS DED* |

[0903] The cp6979 nucleotide sequence <SEQ ID 196> is:

| | |
|---|---|
| 1 | ATGTCTGTTA ATCCATCAGG AAATTCCAAG AACGATCTCT GGATTACGGG |
| 51 | AGCTCATGAT CAGCATCCCG ATTTTAAAGA ATCCGGGGTT ACAAGTGCTA |
| 101 | ACCTAGGAAG TCATAGAGTG ACTGCCTCAG GAGGACGCCA AGGGTTATTA |
| 151 | GCACGAATCA AAGAAGCAGT AACCGGGTTT TTTAGTCGGA TGAGCTTCTT |
| 201 | CAGATCGGGA GCTCCAAGAG GTAGCCAACA ACCCTCTGCT CCATCTGCAG |
| 251 | ATACTGTACG TAGCCCGTTG CCGGGAGGGG ATGCTCGCGC TACCGAGGGA |
| 301 | GCTGGTAGGA ACTTAATTAA AAAAGGGTAC CAACCAGGGA TGAAAGTCAC |
| 351 | TATCCCACAG GTTCCTGGAG GAGGGGCCCA ACGTTCATCA GGTAGCACGA |
| 401 | CACTAAAGCC TACGCGTCCG GCACCCCCAC CTCCTAAAAC GGGTGGAACT |
| 451 | AATGCAAAAC GTCCGGCAAC GCACGGGAAG GGTCCAGCAC CCCAGCCTCC |
| 501 | TAAAACAGGT GGGACCAATG CTAAGCGCGC AGCAACGCAT GGGTAAGGTC |
| 551 | CAGCACCTCA ACCTCCTAAG GGCATTTTGA AACAGCCTGG GCAGTCTGGG |
| 601 | ACTTCAGGAA AGAAGCGTGT CAGCTGGTCT GACGAAGATT AA |

[0904] The PSORT algorithm predicts cytoplasm (0.360).

[0905] The protein was expressed in E. coli and purified as a GST-fusion product (FIG. 98A). The GST-fusion protein was used to immunise mice, whose sera were used in a Western blot (FIG. 98B) and for FACS analysis (FIG. 98C).

[0906] These experiments show that cp6979 is a surface-exposed and immunoaccessible protein, and that it is a useful immunogen. These properties are not evident from the sequence alone.

### Example 99

[0907] The following C. pneumoniae protein (PID 4377028) was expressed <SEQ ID 197; cp7028>:

| | |
|---|---|
| 1 | MLLGFLCDCP CASWQCAAVA NCYDSVFMSR PEHKPNIPYI TKATRRGLRM |
| 51 | KTLAYLASLK DARQLAYDFL KDPGSLARLA KALIAPKEAL QEGNLFFYGC |
| 101 | SNIEDILEEM RRPHRILLLG FSYCQKPKAC PEGRPNDACR YDPSHPTCAS |
| 151 | CSIGTMMRLN ARRYTTVIIP TFIDIAKHLH TLKKRYPGYQ ILFAVTACEL |
| 201 | SLKMFGDYAS VMNLKGVGIR LTGRICNTFK AFKLAERGVK PGVTILEEDG |
| 251 | FEVLARILTE YSSAPFPRDF CEIH* |

[0908] The cp7028 nucleotide sequence <SEQ ID 198> is:

| | |
|---|---|
| 1 | ATGCTTCTAG GGTTTTTGTG TGACTGCCCC TGTGCTTCGT GGCAGTGTGC |
| 51 | GGCCGTTGCT AATTGTTATG ATTCCGTATT TATGTCTAGA CCAGAGCACA |
| 101 | AACCTAATAT TCCTTATATT ACTAAAGCTA CAAGACGGGG TCTGCGTATG |
| 151 | AAGACGCTTG CTTATCTGGC CTCTTTAAAA GATGCTAGAC AGCTTGCCTA |
| 201 | TGATTTTCTG AAAGATCCTG GTTCTTTAGC TCGGTTAGCT AAGGCTTTGA |
| 251 | TAGCTCCTAA GGAGGCCTTA CAGGAGGGCA ACCTATTTTT TTATGGCTGT |
| 301 | AGTAATATTG AGGATATTTT AGAGGAGATG CGTCGTCCTC ATAGAATCCT |
| 351 | TTTGTTAGGA TTTTCTTATT GTCAAAAGCC TAAGGCATGT CCTGAATGGC |
| 401 | GTTTCTATGA TGCTTGTCGG TATGATCCTT CACATCCTAC ATGTGCCTCA |
| 451 | TGTTCTATAG GGACCATGAT GCGGCTGAAT GCTCGTAGAT ACACTACTGT |
| 501 | GATCATCCCT ACATTTATAG ATATCGCAAA ACATTTACAC ACTTTAAAAA |
| 551 | AGCGCTACCC TGGATATCAA ATTCTCTTTG CAGTTACTGC TTGTGAACTT |
| 601 | TCCTTAAAAA TGTTTGGATA TTATGCCTCC GTAATGAACT TAAAGGGTGT |
| 651 | GGGCATCAGA CTCACAGGAC GTATTTGCAA TACATTTAAG GCATTTAAAT |
| 701 | TAGCTGAGCG AGGAGTCAAA CCAGGAGTCA CTATCCTAGA AGAAGATGGC |
| 751 | TTTGAGGTAT TAGCAAGGAT TCTTACAGAA TACAGTAGCG CTCCTTTCCC |
| 801 | TAGAGACTTT TGTGAGATCC ATTAG |

[0909] The PSORT algorithm predicts cytoplasm (0.1453).

[0910] The protein was expressed in E. coli and purified as a GST-fusion product (FIG. 99A). The recombinant protein was used to immunise mice, whose sera were used in a Western blot (FIG. 99B) and for FACS analysis (FIG. 99C).

[0911] These experiments show that cp7028 is a surface-exposed and immunoaccessible protein, and that it is a useful immunogen. These properties are not evident from the sequence alone.

### Example 100

[0912] The following C. pneumoniae protein (PID 4377355) was expressed <SEQ ID 199; cp7355>:

| | |
|---|---|
| 1 | MKKVVTLSII FFATYCASEL SAVTVVAVPL SEAPGKIQVR PVVGLQFQEE |
| 51 | QGSVPYSFYY PYDYGYYYPE TYGYTKNTGQ ESRECYTRFE DGTIFYECD* |

[0913] The cp7355 nucleotide sequence <SEQ ID 200> is:

| | |
|---|---|
| 1 | ATGAAGAAAG TCGTAACACT ATCCATTATA TTTTTCGCAA CGTATTGTGC |
| 51 | ATCAGAGCTT AGTGCTGTAA CTGTAGTGGC TGTGCCTTTA TCAGAGGCTC |
| 101 | CAGGGAAGAT TCAAGTTCGT CCCGTCGTTG GTCTGCAATT TCAAGAAGAA |
| 151 | CAGGGTTCTG TGCCCTATAG TTTTTATTAT CCTTATGACT ATGGGTATTA |
| 201 | CTATCCAGAG ACTTATGGCT ATACTAAAAA TACAGGTCAA GAAAGTCGCG |
| 251 | AATGTTATAC CCGATTTGAA GATGGCACAA TTTTTTATGA ATGCGATTAG |

[0914] The PSORT algorithm predicts inner membrane (0.143).

[0915] The protein was expressed in E. coli and purified as a GST-fusion (FIG. 100A) and a his-tag product. The proteins were used to immunise mice, whose sera were used in a Western blot (FIG. 100B) and for FACS analysis (FIG. 100C).

[0916] These experiments show that cp7355 is a surface-exposed and immunoaccessible protein, and that it is a useful immunogen. These properties are not evident from the sequence alone.

### Example 101

[0917] The following C. pneumoniae protein (PID 4377380) was expressed <SEQ ID 201; cp7380>:

| | |
|---|---|
| 1 | VHYCERTLDP KYILKIALKL RQSLSLFFQN SQSLQHAYST PYSYYRIILQ |
| 51 | KENKEKQALA RHKCISILEF FKNLLFVHLL SLSKNQREGC STDMAVVSTP |
| 101 | FFNRNLWYRL LSSRFSLWKS YCPRFFLDYL EAFGLLSDFL DHQAVIKFFE |
| 151 | LETHFSYYPV SGFVAPHQYL SLLQDRYFPI ASVMRTLDKD NFSLTPDLIH |
| 201 | DLLGHVPWLL HPSFSEFFIN MGRLFTKVIE KVQALPSKKQ RIQTLQSNLI |
| 251 | AIVRCFWFTV ESGLIENHEG RKAYGAVLIS SPQELGHAFI DNVRVLPLEL |
| 301 | DQIIRLPFNT STPQETLFSI RHFDELVELT SKLEWMLDQG LLESIPLYNQ |
| 351 | EKYLSGFEVL CQ* |

[0918] The cp7380 nucleotide sequence <SEQ ID 202> is:

| | |
|---|---|
| 1 | GTGCACTACT GCGAGAGAAC CCTGGACCCA AAGTATATTC TGAAGATTGC |
| 51 | TCTAAAGCTG AGACAATCAC TTTCCCTGTT CTTCCAGAAC AGCCAATCAC |
| 101 | TCCAACGTGC ATACTCGACC CCATATTCCT ACTACCGAAT CATTCTACAA |
| 151 | AAGGAAAATA AAGAGAAGCA AGCTTTAGCT CGACACAAAT GCATTTCTAT |
| 201 | TTTAGAATTT TTCAAAAACT TACTCTTTGT TCATCTTCTG TCATTATCAA |
| 251 | AGAATCAAAG GGAAGGTTGC TCCACTGATA TGGCTGTTGT AAGCACTCCC |
| 301 | TTTTTTAATC GGAATTTATG GTATCGACTC CTTTCCTCAC GGTTTTCTCT |
| 351 | ATGGAAAAGC TATTGTCCAA GATTTTTTCT TGATTACTTA GAAGCTTTCG |
| 401 | GTCTCCTTTC TGATTTCTTA GACCATCAAG CAGTCATTAA ATTCTTCGAA |
| 451 | TTAGAAACAC ATTTTTCCTA TTATCCCGTT TCAGGATTTG TAGCTCCCCA |
| 501 | TCAATACTTG TCTCTGTTGC AGGACCGTTA CTTTCCCATT GCCTCTGTAA |
| 551 | TGCGAACTCT CGATAAAGAT AATTTCTCCT TAACTCCTGA TCTCATCCAT |
| 601 | GACCTTTTAG GGCACGTGCC TTGGCTTCTA CATCCCTCAT TTTCTGAATT |
| 651 | TTTCATAAAC ATGGGAAGAC TCTTCACTAA AGTCATAGAA AAAGTACAAG |
| 701 | CTCTTCCTAG TAAAAAACAA CGCATACAAA CCCTACAAAG CAATCTGATC |
| 751 | GCTATTGTAC GCTGCTTTTG GTTTACTGTT GAAAGCGGAC TTATTGAAAA |
| 801 | CCATGAAGGA AGAAAAGCAT ATGGAGCCGT TCTTATCAGT TCTCCTCAGG |
| 851 | AACTTGGACA CGCTTTCATT GATAACGTAC GTGTTCTCCC TTTAGAATTG |
| 901 | GATCAGATTA TTCGTCTTCC CTTCAATACA TCAACTCCAC AAGAGACTTT |
| 951 | ATTTTCAATA AGACATTTTG ATGAACTGGT AGAACTCACT TCAAAATTAG |
| 1001 | AATGGATGCT CGACCAAGGT CTGTTAGAAT CAATTCCCCT TTACAATCAA |
| 1051 | GAGAAATATC TTTCTGGTTT TGAGGTACTT TGCCAATGA |

[0919] The PSORT algorithm predicts inner membrane (0.1362).

[0920] The protein was expressed in E. coli and purified as a GST-fusion product (FIG. 101A). The recombinant protein was used to immunise mice, whose sera were used in a Western blot (FIG. 101B) and for FACS analysis (FIG. 101C).

[0921] These experiments show that cp7380 is a surface-exposed and immunoaccessible protein, and that it is a useful immunogen. These properties are not evident from the sequence alone.

### Example 102

[0922] The following C. pneumoniae protein (PID 4376904) was expressed <SEQ ID 203; cp6904>:

| | |
|---|---|
| 1 | MMNYEDAKLR GQAVAILYQI GAIKFGKHIL ASGEETPLYV DMRLVISSPE |
| 51 | VLQTVATLIW RLRPSFNSSL LCGVPYTALT LATSISLKYN IPMVLRRKEL |
| 101 | QNVDPSDAIK VEGLFTPGQT CLVINDMVSS GKSIIETAVA LEENGLVVRE |
| 151 | ALVFLDRRKE ACQPLGPQGI KVSSVFTVPT LIKALIAYGK LSSGDLTLAN |
| 201 | KISEILEIES * |

[0923] The cp6904 nucleotide sequence <SEQ ID 204> is:

| | |
|---|---|
| 1 | ATGATGAACT ACGAAGATGC AAAATTACGC GGTCAAGCTG TAGCAATTCT |
| 51 | ATACCAAATC GGAGCTATAA AGTTCGGAAA ACATATTCTC GCTAGCGGAG |
| 101 | AAGAAACTCC TCTGTATGTA GATATGCGTC TTGTGATCTC CTCTCCAGAA |
| 151 | GTTCTCCAGA CAGTGGCAAC TCTTATTTGG CGCCTCCGCC CCTCATTCAA |
| 201 | TAGTAGCTTA CTCTGCGGAG TCCCTTATAC TCCTCTAACC CTAGCAACCT |
| 251 | CGATCTCTTT AAAATATAAC ATCCCTATGG TATTGCGAAG GAAGGAATTA |
| 301 | CAGAATGTAG ACCCCTCGGA CGCTATTAAA GTAGAAGGGT TATTTACTCC |
| 351 | AGGACAAACT TGTTTAGTCA TCAATGATAT GGTTTCCTCA GGAAAATCTA |
| 401 | TAATAGAGAC AGCAGTCGCA CTGGAAGAAA ATGGTCTGGT AGTTCGTGAA |
| 451 | GCATTGGTAT TCTTAGATCG TAGAAAAGAA GCGTGTCAAC CACTTGGTCC |
| 501 | ACAGGGAATA AAAGTCAGTT CGGTATTTAC TGTACCCACT CTGATAAAAG |
| 551 | CTTTGATCGC TTATGGGAAG CTAAGCAGTG GTGATCTAAC CCTGGCAAAC |
| 601 | AAAATTTCCG AAATTCTAGA AATTGAATCT TAA |

[0924] The PSORT algorithm predicts cytoplasm (0.0358).

[0925] The protein was expressed in E. coli and purified as a his-tag product (FIG. 102A). The recombinant protein was used to immunise mice, whose sera were used in a Western blot (FIG. 102B) and for FACS analysis.

[0926] The cp6904 protein was also identified in the 2D-PAGE experiment.

[0927] These experiments show that cp6904 is a surface-exposed and immunoaccessible protein, and that it is a useful immunogen. These properties are not evident from the sequence alone.

### Example 103

[0928] The following C. pneumoniae protein (PID 4376964) was expressed <SEQ ID 205; cp6964>:

| | |
|---|---|
| 1 | MKKLIALIGI FLVPTKGNTN KEHDAHATVL KAARAKYNLF PVQDVFPVHE |
| 51 | VIEPISPDCL VHYEGWV* |

[0929] The cp6964 nucleotide sequence <SEQ ID 206> is:

| | |
|---|---|
| 1 | ATGAAAAAAT TGATTGCTTT GATAGGGATA TTTCTTGTTC CAATAAAAGG |
| 51 | AAATACCAAT AAGGAACACG ACGCTCACGC GACTGTTTTA AAAGCGGCCA |
| 101 | GAGCAAAGTA TAATTTGTTC TTTGTTCAGG ATGTTTTCCC TGTACACGAA |
| 151 | GTTATCQAGC CTATTTCTCC CGAT~PGCCTG GTACATTATG AAGGGTGGGT |
| 201 | TTGA |

[0930] The PSORT algorithm predicts inner membrane (0.091).

[0931] The protein was expressed in E. coli and purified as a GST-fusion product (FIG. 103A) and also in his-tagged form. The recombinant proteins were used to immunise mice, whose sera were used in a Western blot (FIG. 103B) and for FACS analysis (FIG. 103C).

[0932] These experiments show that cp6964 is a surface-exposed and immunoaccessible protein, and that it is a useful immunogen. These properties are not evident from the sequence alone.

### Example 104

[0933] The following C. pneumoniae protein (PID 4377387) was expressed <SEQ ID 207; cp7387>:

| | |
|---|---|
| 1 | LNFAKIDHNH LYLTCLGDLG VACPILSTDC LPNYSEKASH EVLVYSKFRC |
| 51 | ISGEPSRLAT SGNDTYYSIV SLPIGLRYEV TSPSGRHDFN IDMHVAPKIG |
| 101 | AVLSHGTREA KEIPGSSKDY AFFSLTARES LMISEKLAMT FQVSEVIQNC |
| 151 | YSQCTKVWKT NLKEQYRHLS HNTGFELSVK SAF* |

[0934] The cp7387 nucleotide sequence <SEQ ID 208> is:

| | |
|---|---|
| 1 | TTGAATTTTG CAAAGATTGA TCACAATCAT CTCTACCTTA CATGTTTGGG |
| 51 | AGATCTTGGT GTAGCTTGTC CTATACTTTC TACAGATTGT CTACCTAATT |
| 101 | ATAGCGAGAA AGCATCTCAT GAGGTTCTTG TTTATAGTAA ATTTAGATGC |
| 151 | ATTTCTGGAG AGCCATCTCG ACTTGCAACT TCAGGAAATG AGACATATTA |
| 201 | TTCTATAGTA AGTTTACCTA TAGGACTCCG TTACGAAGTG ACTTCACCAT |
| 251 | CAGGACGTCA TGATTTCAAT ATTGATATGC ATGTAGCTCC AAAGATAGGT |
| 301 | GCAGTACTCT CTCATGGAAC ACGAGAGGCT AAAGAGATCC CAGGATCTTC |
| 351 | AAAAGACTAT GCATTTTTTA GCTTGACPGC TAGAGAAAGT TTAATGATTT |
| 401 | CTGAAAAGCT TGCGATGACT TTCCAAGTTA GCGAAGTTAT TCAGAATTGT |
| 451 | TATTCACAAT GTACTAAACT AACGAAAACT AATTTAAAAG AACAGTATAG |
| 501 | GCACTTATCC CACAATACAG GGTTTGAGTT AAGCGTCAAG TCTGCATTCT |
| 551 | AA |

[0935] The PSORT algorithm predicts inner membrane (0.043).

[0936] The protein was expressed in E. coli and purified as a his-tagged-fusion product (FIG. 104A) and also as a GST-fusion (FIG. 104B). The recombinant proteins were used to immunise mice, whose sera were used in a Western blot and for FACS analysis (FIG. 104C; his-tagged).

[0937] These experiments show that cp7387 is a surface-exposed and immunoaccessible protein, and that it is a useful immunogen. These properties are not evident from the sequence alone.

### Example 105

[0938] The following C. pneumoniae protein (PID 4376281) was expressed <SEQ ID 209; cp6281>:

| | |
|---|---|
| 1 | MFLQFFHPIV FSDQSLSFLP YLGKSSGIIE KCSNIVEHYL HLGGDTSVII |
| 51 | TGVSGATFLS VDHALPISKS EKIIKILSYI LILPLILALE IKIVLRIILF |
| 101 | FKYRGLILDV KKEDLKKTLT PDQENLSLPL PSPTTLKKIH ALHILVRSGK |
| 151 | TYNELIQEGP SFTKITDLGQ APSPKQDIGF SYNSLLPNFY FHSLVSVPNI |
| 201 | SGEERALNYH KBQQEEMAVK LKTMQACSFV FRSLHLPSMQ TKDKKAGFGL |
| 251 | LTFFPWKIYP L* |

[0939] The cp6281 nucleotide sequence <SEQ ID 210> is:

| | |
|---|---|
| 1 | ATGTTTCTTC AGTTTTTTCA TCCTATAGTC TTCTCGGATC AGTCCTTATC |
| 51 | TTTTCTTCCT TACCTAGGAA AAAGCTCTGG CATTATTGAA AAATGTTCCA |
| 101 | ATATCGTTGA ACACTATTTA CATTTGGGAG GAGACACTTC TGTTATCATC |
| 151 | ACAGGAGTTT CTGGAGCTAC CTTTCTATCT GTTGATCATG CCCTCCCAAT |
| 201 | CTCGAAATCT GAAAAAATAA TAAAAATTCT CTCCTATATT TTAATTCTTC |
| 251 | CTCTGATTCT AGCTCTCTTT ATTAAAATCG TTTTACGCAT TATCTTATTC |
| 301 | TTCAAGTATC GTGGTCTAAT CCThGATGTT AAGAAGGAGG ATTTGAAAAA |
| 351 | AACACTTACA CCTGACCAAG AAAACCTCAG TCTTCCTTTA CCATCTCCTA |
| 401 | CAACATTAAA GAAAATTCAT GCGCTACACA TTTTAGTGCG TTCTGGAAAA |
| 451 | ACCTATAACG AGCTTATACA AGAAGGGTTT TCTTTCACTA AAATCACAGA |
| 501 | TCTTGGTCAA GCTCCTTCAC CAAAGCAAGA TATTGGCTTC TCTTATAATT |
| 551 | CCCTTCTCCC TAACTTCTAT TTTCATTCCT TGGTATCTGT TCCAAATATT |
| 601 | TCAGGCGAGG AACGGGCTCT TAATTATCAT AAAGAACAAC AAGAGGAAAT |
| 651 | GGCTGTTAAA TTAAAAACAA TGCAAGCGTG TTCTTTTGTC TTCCGATCCC |
| 701 | TGCATTTACC TTCAATGCAA ACGAAGGACA AAAAGGCTGG ATTTGGACTA |
| 751 | CTGACGTTTT TCCCTTGGAA AATCTACCCC CTATAA |

[0940] The PSORT algorithm predicts inner membrane (0.5373).

[0941] The protein was expressed in E. coli and purified as a GST-fusion product (FIG. 105A). The recombinant protein was used to immunise mice, whose sera were used in a Western blot (FIG. 105B) and for FACS analysis.

[0942] These experiments show that cp6281 is a surface-exposed and immunoaccessible protein, and that it is a useful immunogen. These properties are not evident from the sequence alone.

### Example 106 and Example 107

[0943] The following C. pneumoniae protein (PID 4376306) was expressed <SEQ ID 211; cp6306>:

| | |
|---|---|
| 1 | MGNHBTYIHP GVLPSSHAQD VSRSTVYPSR SFIMRRHLMG WNFNRVPSKS |
| 51 | SEQLMDGHRI PLIFFGKHHP TISILNVNRF SWLSIFYNGE RGF* |

[0944] The cp6306 nucleotide sequence <SEQ ID 212> is:

| | |
|---|---|
| 1 | ATGGGAAACC ATGAGACCTA TATACATCCA GGAGTGCTCC CGAGTAGTCA |
| 51 | TGCTCAGGAT GTTAGCAGAT CTACAGTTTA CCCCAGTCGA AGTTTTATCA |
| 101 | TGAGACGTAT GCTCATGGGC TGGAATTTCA ATCGTGTTCC CTCGAAGAGC |
| 151 | TCCGAGCAGT TAATGGATGG TCATCGCATA CCTCTTATAT TTTTTGGGAA |
| 201 | GCATCATCCT ACTATATCTA TTTTAAATGT CAATAGATTT TCTTGGCTCT |
| 251 | CCATTTTTTA CAATGGAGAA AGGGGGTTTT GA |

[0945] The PSORT algorithm predicts cytoplasm (0.167).

[0946] The following C. pneumoniae protein (PID 4376434) was also expressed <SEQ ID 213; cp6434>:

| | |
|---|---|
| 1 | MSESINRSIH LEASTPFFIK LTNLCESRLV KIPSLVISLL ALVGAGVTLV |
| 51 | VLFVAGILPL LPVLILEIIL ITVLVLLWCL VLEPYLIEKP SKIKELPKVD |
| 101 | ELSVVETDST L* |

[0947] The cp6434 nucleotide sequence <SEQ ID 214> is:

| | |
|---|---|
| 1 | ATGTCTGAAA GTATTAACAG AAGCATTCAT TTAGAAGCCT CTACACCATT |
| 51 | TTTTATAAAA TTAACGAATC TCTGTGAAAG TAGATTAGTT AAGATCACTT |
| 101 | CTCTTGTTAT TTCTCTATTA GCTTTAGTGG GTGCGGGAGT CACTCTTGTG |
| 151 | GTTTTATTTG TAGCTGGGAT CCTTCCTTTA CTTCCTGTAC TCATCTTAGA |
| 201 | AATTATTTTA ATAACCGTCC TTGTCTTGCT TTTTTGTTTG GTATTGGAAC |
| 251 | CTTATTTAAT AGAAAAACCT AGTAAAATAA AGGAACTACC TAAAGTAGAC |
| 301 | GAGCTATCTG TAGTAGAAAC GGACAGTACT CTTTAA |

[0948] The PSORT algorithm predicts inner membrane (0.6859).

[0949] The proteins were expressed in E. coli and purified as his-tag products (FIG. 106A; 6306=lanes 24; 6434=lanes 8-10). The recombinant proteins were used to immunise mice, whose sera were used in Western blots (FIGS. 106B & 107) and for FACS analysis.

[0950] These experiments show that cp6306 & cp6434 are surface-exposed and immunoaccessible proteins, and that they are useful immunogens. These properties are not evident from the sequences alone.

### Example 108

[0951] The following C. pneumoniae protein (PID 4377400) was expressed <SEQ ID 215; cp7400>:

| | |
|---|---|
| 1 | MRVMRFFCLF FLGFLGSFHC VAEDKGVDLF GVWDDNQITE CDDSYMTEGR |
| 51 | EEVEXVVDA |

[0952] The cp7400 nucleotide sequence <SEQ ID 216> is:

| | |
|---|---|
| 1 | GTGAGAGTTA TGAGATTTTT TTGTCTATTT TTTCTTGGGT TCCTAGGATC |
| 51 | TTTTCATTGT GTTGCTGAAG ACAAGGGCGT GGATTTATTT GGAGTCTGGG |
| 101 | ACGATAACCA AATTACAGAG TGTGACGATA GTTACATGAC AGAGGGTCGT |

[0953] The PSORT algorithm predicts periplasmic space (0.924).

[0954] The protein was expressed in E. coli and purified as a GST-fusion product (FIG. 108A). The recombinant protein was used to immunise mice, whose sera were used in a Western blot (FIG. 108B) and for FACS analysis.

[0955] These experiments show that cp7400 is a surface-exposed and immunoaccessible protein, and that it is a useful immunogen. These properties are not evident from the sequence alone.

### Example 109

[0956] The following C. pneumoniae protein (PID 4376395) was expressed <SEQ ID 217; cp6395>:

| | |
|---|---|
| 1 | MENAMSSSBV YNGPSWILKT SVAQEVPKKH GKGIQVLLST SVMLFIGLGV |
| 51 | CAFIFPQYLI VFVLTIALLM LAISLVLFFL IRSVRSSMVD RLWCSEKGYA |
| 101 | LHQHENGPFL DVKRVQQILL RSPYIKVRAL WPSGDIPEDP SQAAVLLLSP |
| 151 | WTFFSSVDVE ALLPSPQEKE GKYIDPVLPK LSRIERVSLL VFLSAFTLDD |
| 201 | LNEQGVNPIM NNEEFLFFIN KKAREHGIQD LKHEIMSSLE KTGVPLDPSM |
| 251 | SFQVSQAMFS VYRYLRQRDL TTSELRCFHL LSCFKGDVVH CLASFENPKD |
| 301 | LADSDFLEAC KNVEWGEFIS ACEKALLKNP QGISIKDLKQ FLVR* |

[0957] The cp6395 nucleotide sequence <SEQ ID 218> is:

| | |
|---|---|
| 1 | ATGGAGAATG CTATGTCATC ATCGTTTGTG TATAATGGGC CTTCGTGGAT |
| 51 | TTTAAAAACG TCAGTAGCTC AGGAGGAATT TAAAAAGCAC GGTAAGGGGA |
| 101 | TTCAGGTTCT CTTAAGTACT TCAGTGATGC TTTTTATAGG TCTTGGAGTC |
| 151 | TGTGCCTTTA TATTTCCTCA ATATCTGATT GTTTTTGTTT TGACTATAGC |
| 201 | TTTGCTTATG CTCGCTATAA GCTTGGTATT GTTTCTCTTA ATACGTTCTG |
| 251 | TACGCTCTTC AATGGTAGAT CGTTTGTGGT GTTCTGAAAA AGGATATGCT |
| 301 | CTTCATCAAC ATGAGAACGG GCCTTTTTTG GATGTGAAGC GTGTACAGCA |
| 351 | AATTCTTCTA AGATCACCCT ATATTAAAGT TCGGGCTTTA TGGCCGTCTG |
| 401 | GAGATATCCC TGAGGATCCT TCACAAGCTG CGGTTCTATT ACTTTCTCCT |
| 451 | TGGACTTTCT TTTCATCCGT GGATGTAGAG GCTTTATTAC CGAGTCCTCA |
| 501 | AGAAAAGGAG GGTAAGTATA TAGATCCTGT GCTGCCTAAG TTGTCTAGGA |
| 551 | TAGAGAGAGT CTCACTTTTA GTGTTTTTGA GTGCATTTAC TTTGGATGAC |
| 601 | TTAAACGAAC AGGGAGTCAA TCCTTTGATG AATAATGAGG AATTTTTATT |
| 651 | TTTTATAAAT AAGAAAGCGC GTGAGCATGG GATTCAGGAT TTAAAACACG |
| 701 | AGATTATGTC TTCGTTAGAG AAAACAGGAG TGCCATTAGA CCCCTCAATG |
| 751 | AGTTTTCAAG TTTCACAAGC GATGTTTTCT GTATATCGCT ACTTGAGACA |
| 801 | AAGGGATTTA ACGACTTCAG AATTAAGATG TTTTCACCTC TTAAGTTGTT |
| 851 | TTAAAGGGGA TGTGGTTCAT TGTTTAGCTT CATTTGAAAA CCCTAAAGAT |
| 901 | TTAGCAGATT CTGACTTTTT AGAAGCTTGT AAGAACGTGG AATGGGGTGA |
| 951 | GTTTATTTCG GCATGTGAGA AGGCTCTTTT AAAGAATCCG CAAGGAATTT |
| 1001 | CCATTAAGGA TCTAAAACAA TTTTTAGTGA GGTAA |

[0958] The PSORT algorithm predicts inner membrane (0.6307).

[0959] The protein was expressed in E. coli and purified as a GST-fusion product (FIG. 109A). The recombinant protein was used to immunise mice, whose sera were used in a Western blot FIG. 109B) and for FACS analysis.

[0960] These experiments show that cp6395 is a surface-exposed and immunoaccessible protein, and that it is a useful immunogen. These properties are not evident from the sequence alone.

### Example 110

[0961] The following C. pneumoniae protein (PID 4376396) was expressed <SEQ ID 219; cp6396>:

| | |
|---|---|
| 1 | MIEFAFVPHT SVTADRIEDR MACRMNKLST LAITSLCVLI SSVCIMIGIL |
| 51 | CISGTVGTYA FVVGIIFSVL ALVACVFFLY FFYPSSEEFK CASSQEFRFL |
| 101 | PIPAVVSALR SYEYISQDAI NDVIRDTMQL SThSSLLDPE AFFLEFPYFN |
| 151 | SLIVNUSMKE ADRLSREAFL ILLGEITWXD CETKILPWLK DPNITPDDFW |
| 201 | KLLKDHFDLK DFKKRIATWI RXAYPEIRLP KKHCLDKSIY KGCCKFLLLS |
| 251 | ENDVQYQRLL HKVCYPSGEF PAMVLGLGSE VPMVLGLPKV PKDLTWEMFM |
| 301 | ENMPVLLQSK REGHWKISLE DVASL* |

[0962] The cp6396 nucleotide sequence <SEQ ID 220> is:

| | |
|---|---|
| 1 | ATGATCGAGT TTGCTTTTGT TCCTCATACC TCCGTGACAG CGGATCGGAT |
| 51 | TGAGGATCGC ATGGCCTCTC GCATGAACAA GTTGTCTACT TTAGCAATTA |
| 101 | CAAGTCTTTG TGTATTGATC AGTTCAGTTT GTATTATGAT TGGGATTTTA |
| 151 | TGCATTTCTG GAACGGTTGG GACCTATGCA TTTGTTGTAG GAATTATTTT |
| 201 | TTCTGTGCTT GCTTTGGTAG CATGTGTTTT CTTTCTTTAT TTCTTTTATT |
| 251 | TTTCTTCTGA GGAATTTAAG TGTGCTTCTT CGCAGGAGTT TCGTTTTTTG |
| 301 | CCTATACCAG CTGTGGTTTC TGCATTGCGT TCCTATGAAT ACATTTCTCA |
| 351 | GGACGCTATC AATGACGTTA TAAAAGATAC GATGCAGTTG TCTACCCTTP |
| 401 | CTTCTCTTTT AGATCCCGAA GCTTTTTTCT TAGAATPTCC TTATTTTAAC |
| 451 | TCTTTGATAG TGAATCATTC GATGAAGGAA GCGGATCGTT TCTCTCGAGA |
| 501 | GGCTTTTTTG ATTTTATTAG GTGAGATTAC TTGGAAGGAT TGTGAAACAA |
| 551 | AAATTTTGCC ATGGTTGAAA GATCCTAATA TCACTCCTGA TGATTTCTGG |
| 601 | AAGCTAPTAA AAGACCATTT CGATTTAAAG GACTTTAAGA AGAGGATCGC |
| 651 | CACTTGGATA CGGAAGGCCT ATCCAGAAAT TAGATTACCO AAGAAGCATT |
| 701 | GTTTAGATAA GTCTATCTAT AAGGGGTGTT GTAAGTTTTT ATTACTTTCT |
| 751 | GAGAATGATG TGCAATATCA GAGOTTATTA CATAAGGTCT GTTATTTCTC |
| 801 | TGGGGAGTTT CCTGCCATGG TTTTAGGTTT GGGAAGTGAA GTGCCTATGG |
| 851 | TGTTAGGACT CCCTAAGGTT CCCAAGGATC TTACCTGGGA GATGTTTATG |
| 901 | GAAAATATGC CTGTTCTTCT GCAAAGCAAA AGAGAGGGGC ATTGGAAAAT |
| 951 | CTCCTTGGAA GACGTAGCCT CTCTTTAA |

[0963] The PSORT algorithm predicts inner membrane (0.6095).

[0964] The protein was expressed in E. coli and purified as a GST-fusion product (FIG. 110A). The recombinant protein was used to immunise mice, whose sera were used in a Western blot (FIG. 110B) and for FACS analysis.

[0965] These experiments show that cp6396 is a surface-exposed and immunoaccessible protein, and that it is a useful immunogen. These properties are not evident from the sequence alone.

### Example 111

[0966] The following C. pneumoniae protein (PID 4376408) was expressed <SEQ ID 221; cp6408>:

| | |
|---|---|
| 1 | MNTfSLKRPLK SHPDVVGSFL RPEHLKRTRE SLKEGSISLD QLMQIEDIAI |
| 51 | QDLIKKQKAA GLSFITDGEF RRATWHYDFM WGFHGVGHHR ATEGVFFPGE |
| 101 | RAMIDDTYLT DKISVSHHPF VDHFKFVKAL EDEFTTAKQT LPAPAQFLKQ |
| 151 | MIFPNNIEVT RXFYPTNQEL IEDIVAGYEK VIRDLYDAGC RYLQLDDCTR |
| 201 | GGLVDPRVCS WYGIDEKGLQ DLIQQYLLIN NLVIADRPDD LVVNLHVCRG |
| 251 | NYHSKFFASG SYDFIAKPLF EQTNVDGYYL EFDHERSGDF SPLTFISGEK |
| 301 | TVCLGLVTSK TPTLENKDEV IARIHQAADY LPLERLSLSP QOOFASCEIG |
| 351 | NKLTEEEQWA KVALVKEISE EVWK* |

[0967] The cp6408 nucleotide sequence <SEQ ID 222> is:

| | |
|---|---|
| 1 | ATGAATACTT CACTAAAAAG ACCTCTGAAA TCTCATTTTG ATGTTGTCGG |
| 51 | TAGTTTTTTG CGTCCTGAGC ATTTAAAAAA AACTAGAGAA AGCCTTAAAG |
| 101 | AAGGCTCTAT TTCTCTAGAT CAACTCATGC AAATTGAGGA TATCGCTATC |
| 151 | CAAGATTTGA TCAAAAAACA AAAAGCAGCA GGTCTTTCTT TTATTACTGA |
| 201 | TGGAGAATTC CGCAGAOCTA CGTGGCATTA CGACTTCATG TGGGGTTTTC |
| 251 | ATGGCGTAGG TCACCACAGA GCTACAGAAG GAGTTTTCTT TGATGGAGAA |
| 301 | CGCGCTATGA TCGATGATAC CTATCTGACA GACAAGATCT CTGTATCTCA |
| 351 | CCACCCATTT GTGGATCACT TTAAATTTGT AAAAGCTCTA GAAGATGAAT |
| 401 | TTACCACTGC AAAGCAAACT CTTCCTGCAC CGGCACAGTT TTTAAAGCAX |
| 451 | ATGATCTTCC CTAATAATAT AGAGGTCACA CGTAAATTCT ATCCTACAAA |
| 501 | TCAGGAGCTA ATTGAAGATA TTGTTGCAAG TTATCGTAAA GTCATTCGCG |
| 551 | ATCTTTATGA TGCTGGCTGC CGCTATCTCC AATTAGATGA CTGTACTCGG |
| 601 | GGAGGTTTAG TAGACCCTCG AGTCTGTTCG TGGTATGGTA TCQATGAAAA |
| 651 | AGGTCTTCAA GATCTGATTC AACAATATCT TCTGATTAAT AATCTTGTAA |
| 701 | TTGCAGATCG TCCCGATGAT CTAGTCGTTA ATTTACATGT ATGCCGTGGG |
| 751 | AACTACCACT CAAAATTCTT TGCTAGTGGT AGTTATGACT TTATTGCAAA |
| 801 | GCCCCTATTC GAACAAACAA ATGTAGACGG CTTCTATTTA GAGTTTGATC |
| 851 | ATGAGCGTTC TGGAGACTTC TCTCCTCTCA CCTTCTTTTC TGGAGAAAAA |
| 901 | ACTGTCTGCT TAGGTCTTGT TACCAGCAAA ACCCCTACAC TTGAAAATAA |
| 951 | GGATCAGGTC ATTGCTCGCA TACATCAAGC AGCAGACTAC CTGCCCTTGG |
| 1001 | AAAGACTCTC TCTAAGTCCA CAGTGTGGTT TTGCTTCATG TGAAATAGGA |
| 1051 | AATAAATTAA CAGAAGAAGA GCAATGGGCT AAAGTTGCTC TAGTAAAAGA |
| 1101 | AATTTCCGAA GAAGTTTGGA AATAA |

[0968] The PSORT algorithm predicts cytoplasm (0.2171).

[0969] The protein was expressed in E. coli and purified as a GST-fusion product (FIG. 111A) and also as a his-tagged product. The his-tag protein was used to immunise mice, whose sera were used in a Western blot (FIG. 111B), and for FACS analysis.

[0970] These experiments show that cp6408 is a surface-exposed and immunoaccessible protein, and that it is a useful immunogen. These properties are not evident from the sequence alone.

### Example 112

[0971] The following C. pneumoniae protein (PID 4376430) was expressed <SEQ ID 223; cp6430>:

| | |
|---|---|
| 1 | MKLYSISSDV DTPWIFQLMS KVDSYLFLGG NRIKVVSIVN QEPNLIIGKV |
| 51 | ENVRISTIVK ILKILSFLIF PLILIALALH YFLHAKYANH LLVSKILERA |
| 101 | PQYVPXPGRS GDTASHYKLT TLVPVSQKNL QAMGSNPLEV RAMARTTKPS |
| 151 | EECVPAKYRQ IIISSHGIRF SLDLBQLADD INLDSVSWPT EYLNSTMDEC |
| 201 | SKADKRVIQN VQNLRTGTYI NSVGKRSLLK FMLQHLFIDG ITQENPEALP |
| 251 | NNTSGRLTLF PSVRYIYSHF TPQNPTIWPQ VFFRQGPLDE DRGGGFEILB |
| 301 | QLQELGVRPP ICPSQGPDNP NFQGFQGIRX YWEDSYQPNK EV* |

[0972] The cp6430 nucleotide sequence <SEQ ID 224> is:

| | |
|---|---|
| 1 | ATGAAACTTT ATAGCATCTC TTCAGATGTA GATACACCTT GGATATTTCA |
| 51 | GCTTATGTCA AAGGTAGATT CTTATCTTTT CTTAGGCGGG AATAGAATCA |
| 101 | AGGTTGTATC TATAGTTATG CAAGAACCTA ACTTAATTAT TGGAAAAGTA |
| 151 | GAAAACGTTC GGNVCTCCAC AATAGTGAAA ATATTAAAAA TTTTATCCTT |
| 201 | CTTAATCTTC CCTCTGATTT TAATCGCTTT AGCCCTACAC TATTTTCTAC |
| 251 | ATGCTAAATA TGCTAATCAC TTACTTGTAT CTAAGATTTT AGAAAGAGCT |
| 301 | CCTCAGTATG TGCCTAATCC TGGTCGTTCA GGAGAQACGG CGTCTCATTA |
| 351 | TAAATTAACA ACATTGGTTC CAGTATCCCA AAAAAATOTA CAAGCPATGG |
| 401 | GATCAAATCC TCTAGAAGTT GAAGCGGCTC TTCGAACTAC AAAACCCTCT |
| 451 | TTTTTCTGTG TACCTGCAAA ATACCGTCAG ATTATAATTT CAAGICACGG |
| 501 | CATTCGCTTT TCTTTAGATC TTGAACAACT TGCTGATGAC ATTAATTTAG |
| 551 | ATTCGGTTTC CTGGCCTACG GAGTATCTTA ACTCTACTAT GGATTTTTGC |
| 601 | AGCAAGGCAG ATAAACGTGT TATACAGAAT GTACAAAATC TGCGGACAGG |
| 651 | AACTTACATA AATTCTGTAG GAAAGCGTAG CCTTTTAAAA TTCATGTTAC |
| 701 | AGCACCTATT TATTGATOGG ATCACACAAG AAAACCCTQA AGCCCTTCCT |
| 751 | AACAATACAT CTGGAAGACT GACTCTATTC CCTAGTGTTC GTTATATCTA |
| 801 | TTCTCATTTT ACTCCACAAA ATCCTACAAT ATGGCCGCAA GTCTTTTTCA |
| 851 | GACAAGGTCC TCTAGATGAA GATCGAGGAG GAGGATTTGA GATCTTAGAG |
| 901 | CAATTACAAG AGTTACGAGT TAGGTTTCCA ATTTGCCCCT CTCAAGGACC |
| 951 | AGACAATCCT AATTTTCAAG GTTTTCAAGG GATTCGTATC TATTGGGAAG |
| 1001 | ATTCCTATCA ACCCAATAAG GAGGTTTAA |

[0973] The PSORT algorithm predicts inner membrane (0.5140).

[0974] The protein was expressed in E. coli and purified as a GST-fusion product (FIG. 112A). The recombinant protein was used to immunise mice, whose sera were used in a Western blot (FIG. 112B) and for FACS analysis.

[0975] These experiments show that cp6430 is a surface-exposed and immunoaccessible protein, and that it is a useful immunogen. These properties are not evident from the sequence alone.

### Example 113

[0976] The following C. pneumoniae protein (PID 4376439) was expressed <SEQ ID 225; cp6439>:

| | |
|---|---|
| 1 | MSYDTLFKNL BKEDSVHKIC NEIFALVPRL NTIACTEAII KNLPKADIHV |
| 51 | HLPGTITPQL AWILGVKNGF LKWSYNSWTN HRLLSPKNPH RQYSNIFRNF |
| 101 | QDICHEKDPD LSVLQYNILN YDFNSFDRVM ATVQGHRFPP GGIQNEEDLL |
| 151 | LIFNNYLQQC LDDTIVYTEV QQNIRLAHVL YPSLPEKHAR MKFYQILYRA |
| 201 | SQTFSKHGIT LRFLNCENKT FAPQINTQEP AQEAVQWLQE VDSTFPGLFV |
| 251 | GIQSAGSESA PGACPKRLAS GYENAYDSGF GCEAHAGEGI ETRTIFSSAK |
| 301 | VNPEGLIEIT RVTFSSLKRK QPSSLPIRVT CQLG* |

[0977] The cp6439 nucleotide sequence <SEQ ID 226> is:

| | |
|---|---|
| 1 | ATGTCTTATG ATACGTTATT CAAGAATCTT GAAAAGGAAG ATTCTGTACA |
| 51 | TAAGATATGC AATGAGATCT TTGCATTAGT ACCACGACTC AATACAATCG |
| 101 | CTTGCACCGA AGCTATCATC AAAAACCTCC CCAAAGCAGA TATCCATGTA |
| 151 | CACCTTCCTG GGACCATAAC ACCTCAATTA GCTTGGATTT TAGGTGTGAA |
| 201 | AAATGGGTTC TTAAAATGGT CTTATAATTC TTGGACCAAT CATCGATTAC |
| 251 | TTTCTCCPAA GAATCCTCAT AAACAATACT CCAATATTTT CCGAAACTTT |
| 301 | CAAGATATCT GTCACGAAAA GGATCCGGAT TTAAGTGTAT TACAATATAA |
| 351 | TATCTTAAAT TACGATTTTA ATAGCTTTGA TAGAGTGATG GCTACAGTAC |
| 401 | AAGGACATCG CTTTCCTCCT GGTGGAATCC AAAATGAAGA AGACCTTCTT |
| 451 | CTCATTTTCA ATAACTATCT CCAGCAATGT CTGGACGATA CTATCGTGTA |
| 501 | TACTGAAGTA CAACAAAATA TCCGCCTTGC CCATGTTTTG TATCCTTCAT |
| 551 | TACCTGAAAA GCACGCGCGT ATGAAGTTTT ATCAAATCTT GTATCGTGCT |
| 601 | TCGCAAACGT TTTCAAAACA CGGGATTACT TTACGAATTT TAAACTGCTT |
| 651 | CAATAAAACA TTTGCTCCAC AAATTAACAC ACAAGAACCT GCCCAAGAAG |
| 701 | CTGTTCAATG GCTCCAAGAG GTTGATTCTA CATTTCCTGG TCTATTTGTA |
| 751 | GGGATACAAT CCGCAGGATC AGAATCTGCG CCCGGAGCCT GTCCTAAGCG |
| 801 | ATTAGCTTCT GGATATAGAA ATGCTTATGA CTCAGGGTTT GGTIGTGAAG |
| 851 | CTCATGCTGG AGAAGGCATA GAGACCCGGA CTATTTTTTC GTOAGCTTAG |
| 901 | GTAAATCCAG AGGGATTGAT CGAGATAACC CGAGTGACTT TCTCGTCTCT |
| 951 | TAAACGAAAA CAGCCATCTA GTTTACCCAT AAGAGTTACT TGCCAGTTAG |
| 1001 | GATAA |

[0978] The PSORT algorithm predicts cytoplasm (0.1628).

[0979] The protein was expressed in E. coli and purified as a GST-fusion product (FIG. 113A). The recombinant protein was used to immunise mice, whose sera were used in a Western blot FIG. 113B) and for FACS analysis.

[0980] These experiments show that cp6439 is a surface-exposed and immunoaccessible protein, and that it is a useful immunogen. These properties are not evident from the sequence alone.

### Example 114

[0981] The following C. pneumoniae protein (PID 4376440) was expressed <SEQ ID 227; cp6440>:

| | |
|---|---|
| 1 | LQSARRHLNT IFILDFGSQY TYVLAKQVRK LFVYCEVLPW NISVQCLKER |
| 51 | APLGIILSGG PHSVYENKAP HLDPEIYKLG IPILAXCYGM QLMARDFGGT |
| 101 | VSPGVGEFGY IPIHLYPCEL FKHIVDCESL ITEIRMSHRD HVTTIPEGFN |
| 151 | VIASTSQCSI SGIENTKQRL YGLQFHPEVS DSTPTGNKIL ETFVQEICSA |
| 201 | PTLWNPLYIQ QDLVSKIQDT VIEVFDEVAQ SLDVQWLAQG TIYSDVIESS |
| 251 | RSGHASEVIK SHHNVGGLPK NLKLKLVEPL RYLPKDEVRI LGEALGLSSY |
| 301 | LLDRHPFPGP GLTIRVIGEI LPEYLAILRR ADLIFIEELR KAKLYDKISQ |
| 351 | AFALFLPIKS VSVKGDCRSY GYTIALRAVE STDFMTGRWA YLPCDVLSSC |
| 401 | SSRIINBIPE VSRVVYDISD KPPATIEWE* |

[0982] The cp6440 nucleotide sequence <SEQ ID 228> is:

| | |
|---|---|
| 1 | TTGCAGAGTG CAAGGAGACA TTTGAACACC ATATTTATTC TAGATTTTGG |
| 51 | ATCTCAATAT ACTTATGTAT TAGCAAAGCA AGTGCGGAAG TTATTTGTAT |
| 101 | ATTGCGAAGT TCTTCCCTGG AATATCTCTG TGCAATGTTT AAAAGAAAGA |
| 151 | GCOCCTTTGG GGATCATTCT CTCAGGAGGT CCTCACTCTG TCTATCAAAA |
| 201 | CAAGGCTCCA CATTTATATC CTGAAATCTA TAAACTTGGC ATTCCAATTC |
| 251 | TAGCTATTTG CTATGGCATG CAGCTTATGG CTAGAGATTT TGGAGGGACT |
| 301 | GTAAGCCCPG GTGTAGGAGA ATTTGGATAT ACGCCCATCC ATCTGTATCC |
| 351 | TTGTGAGCTC TTCAAACACA TCGTCGACTG CGAATCTCTA GACACAGAGA |
| 401 | TTCGGATGAG CCATCGGGAT CATGTTACGA CAATTCCTGA AGGATTTAAT |
| 451 | GTAATCGCAT CCACCTCACA ATGCTCGATC TCAGGAATAG AAAATACCAA |
| 501 | ACAACGGTTG ThCGGGCTGC AATTTCATCC CGAGGTTTCT GACTCCACTC |
| 551 | CAACGGGAAA TAAGATTCTA GAAACTTTTG TTCAAGAGAT CTGTTCTGCT |
| 601 | CCCACACTAT GGAATCCCTT GTATATTCAG CAAGACCTTG TAAGTAAAAT |
| 651 | TCAAGATACC GTTATTGAAG TATTTGATGA AGTCGCTCAG TCATTAGACG |
| 701 | TACAATGGTT AGCTCAAGGA ACCATCTACT CAGATGTTAT TGAGTCCTCA |
| 751 | CGCTCTGGAC ATGCCTCCGA AGTAATAAAA TCACATCATA ATGTAGGGGG |
| 801 | GCTTCCAAAA AATCTTAAGC TGAAGTTAGT CGAGCCCTTA CGTTATTTAT |
| 851 | TTAAAGATGA AGTTCGAATT TTAGGAGAAG CCCTAGGACT TTCTAGCTAT |
| 901 | CTCTTGGACA GGCATCCTTT TCCTGGACCT GGCTTGACAA TTCGTGTGAT |
| 951 | TGGAGAGATC CTTCCTGAAT ATCTAGCCAT TTTACGACGG GCGGACCTCA |
| 1001 | TCTTTATAGA AGAGCTTAGG AAAGCAAAAC TCTACGATAA AATAAGCCAA |
| 1051 | GCCTTTGCTC TATTTCTTCC TATAAAATCA QTATCTGTAA AAGGAGATTG |
| 1101 | TAGAAGCTAT GGTTATACCA TAGCATTACG TGCTGTAGAA TCTACAGATT |
| 1151 | TCATGACAGG ACGATGGGCC TACCTTCCAT GCGA1GTTCT CAGTTCTTGC |
| 1201 | TCATCGCGAA TTATTAATGA AATACCCGAG GTAAGCCGAG TGGTCTATGA |
| 1251 | TATTTCTGAC AAGCCACCAG CAACTATAGA ATGGGAATAG |

[0983] The PSORT algorithm predicts cytoplasm (0.0481).

[0984] The protein was expressed in E. coli and purified as a GST-fusion product (FIG. 114A) and also as a his-tagged product. The recombinant proteins were used to immunise mice, whose sera were used in a Western blot (FIG. 114B) and for FACS analysis.

[0985] These experiments show that cp6440 is a surface-exposed and immunoaccessible protein, and that it is a useful immunogen. These properties are not evident from the sequence alone.

### Example 115

[0986] The following C. pneumoniae protein (PID 4376475) was expressed <SEQ ID 229; cp6475>:

| | |
|---|---|
| 1 | MNTYTFSPTL QKSFSLFLLE KLDSYFFPGG TRTQILVITP TNIRLAAKKR |
| 51 | GCKVSTIEKI IKILSFILLP IVIIAFILRY FLHKKFDKQF LCIPKVISNE |
| 101 | DEALLGSRPQ AVEKAVREIS PAFFSIPRKY QLIRIDTPKD DAPSILFPIG |
| 151 | IEIILKDLCI DTLKQSNLFL KREMDFLGHP EEKALFDSIC SIEKDQEWMS |
| 201 | LESKKLLITH FLKYLFVSGI EQLNPGFNPE NGRGYFSEIS TAKIHFHQHG |
| 251 | RYGPIRSSGP IMKEI* |

[0987] The cp6475 nucleotide sequence <SEQ ID 230> is:

| | |
|---|---|
| 1 | ATGAATACCT ATACCTTCTC TCCTACACTT CAGAAAAGCT TCAGCCTATT |
| 51 | TCTTTTAGAA AAATTAGACT CTTACTTTTT CTTTGGAGGG ACTCGTACAC |
| 101 | AAATCTTAGT CATCACACCA ACCAATATTA GATTAGCAGC TAAAAAAAGA |
| 151 | GGGTGTAAGG TTTCTACTAT AGAAAAGATA ATCAAGATCC TCTCTTTTAT |
| 201 | CCTGCTGCCC CTAGTTATCA TTGCCTTTAT ACTTCGCTAT TTCTTACATA |
| 251 | AGAAATTCGA TAAACAGTTC TTGTGTATCC CAAAAGTCAT TTCTAACGAA |
| 301 | GACGAAGCTC TTCTTGGATC TAGACCACAA GCAGTTGAAA AAGCAGTTCG |
| 351 | AGAAATATCT CCAGCCTTCT TCTCTATACC AAGAAAATAC CAACTTATTA |
| 401 | GAATCGACAC TCCTAAAGAT GACGCTCCCT CAATCCTTTT CCCTATAGGC |
| 451 | ATAGAGATCA TTCTCAAAGA TTTATGTATT GATACACTCA AGCAATCTAA |
| 501 | TCTTTTCCTT AAAAGAGAAA TGGATTTCTT AGGTCATCCA GAAGAAAAAG |
| 551 | CATTATTCGA CTCGATATGT TCTATAGAAA AAGATCAAGA ATGGATGAGC |
| 601 | TTGGAAAGTA AAAAACTTTT AATCACGCAC TTCCTAAAGT ATCTCTTTGT |
| 651 | CTCTGGAATC GAACAACTAA ATCCAGGCTT TAACCCAGAG AATGGGCGTG |
| 701 | GGTATTTTTC AGAAATAAGT ACAGCAAAGA TCCATTTTCA TCAGCACGGT |
| 751 | CGATATGGGC CAATCCGTTC TTCGGGACCC ATCATGAAGG AAATATAA |

[0988] The PSORT algorithm predicts inner membrane (0.5373).

[0989] The protein was expressed in E. coli and purified as a GST-fusion product (FIG. 115A). The recombinant protein was used to immunise mice, whose sera were used in a Western blot (FIG. 115B) and for FACS analysis.

[0990] These experiments show that cp6475 is a surface-exposed and immunoaccessible protein, and that it is a useful immunogen. These properties are not evident from the sequence alone.

### Example 116

[0991] The following C. pneumoniae protein (PID 4376482) was expressed <SEQ ID 231;cp6482>:

| | |
|---|---|
| 1 | MLVELEALKR EFAHLKDQKP TSDQEITSLY QCLDHLEFVL LGLGDKFLK |
| 51 | ATEDEDVLFE SQKAIDAWNA LLTKARDVLG LGDIGAIYQT IEFLGAYLSK |
| 101 | VNRRAFCIAS EIHFLKTAIR DLNAYYLLDP RWPLCKIEEF VDWGNDCVEI |
| 151 | AKRKLCTFEK ETKELNESLL REEHAMEKCS IQDLQRKLSD IIIELHDVSL |
| 201 | FCFSKTPSQE EYQKDCLYQS RLRYLLLLYE YTLLCKTSTD FQEQARAKEE |
| 251 | FIREKFSLLE LEKGIKQTKE LEFAIAKSKL ERGCLVMRKY EAAAKHSLDS |
| 301 | MFEEETVKSP RKDTE* |

[0992] The cp6482 nucleotide sequence <SEQ ID 232> is:

| | |
|---|---|
| 1 | ATGCTAGTAG AGTTAGAGGC TCTTAAAAGA GAGTTTGCGC ATTTAAAAGA |
| 51 | CCAGAAGCCG ACAAGTGACC AAGAGATCAC TTCACTTTAT CAATGTTTGG |
| 101 | ATCATCTTGA ATTCGTTTTA CTCGGGCTGG GCCAGGACAA ATTTTTAAAG |
| 151 | GCTACGGAAG ATGAAGATGT GCTTTTTGAG TCTCAAAAAG CAATCGATGC |
| 201 | GTGGAATGCT TTATTGACAA AAGCCAGAGA TGTTTTAGGT CTTGGGGACA |
| 251 | TAGGTGCTAT CTATCAGACT ATAGAATTCT TGGGTGCCTA TTTATCAAAA |
| 301 | GTGAATCGGA GGGCTTTTTG TATTGCTTCG GAGATACATT TTCTAAAAAC |
| 351 | AGCAATCCGA GATTTGAATG CATATTACCT GTTAGATTTT AGATGGCCTC |
| 401 | TTTGCAAGAT AGAAGAGTTT GTGGATTGGG GGAATGATTG TGTTGAAATA |
| 451 | GCAAAGAGGA AGCTATGCAC TTTTGAAAAA GAAACCAAGG AGCTCAATGA |
| 501 | GAGCCTTCTT AGAGAGGAGC ATGCGATGGA GAAATGCTCG ATTCAAGATC |
| 551 | TGCAAAGGAA ACTTAGCGAC ATTATTATTG AATTGCATGA TGTTTCTCTT |
| 601 | TTTTGTTTTT CTAAGACTCC CAGTCAAGAG GAGTATCAAA AGGATTGTTT |
| 651 | GTATCAATCA CGATTGAGGT ACTTATTGTT GCTGTATGAG TATACAPTGT |
| 701 | TATGTAAGAC ATCCACAGAT TTTCAAGAGC AGGCTAGGGC TAAAGAGGAG |
| 751 | TTCATTAGGG AGAAATTCAG CCTTCTAGAG CTCGAAAAGG GAATAAAACA |
| 801 | AACTAAAGAG CTTGAGTTTG CAATTGCTAA AAGTAAGTTA GAACGGGGCT |
| 851 | GTTTAGTTAT GAGGAAGTAT GAAGCTGCCG CTAAACATAG TTTAGATTCT |
| 901 | ATGTTCGAAG AAGAAACTGT GAAGTCGCCG CGGAAAGACA CAGAATAA |

[0993] The PSORT algorithm predicts cytoplasm (0.4607).

[0994] The protein was expressed in E. coli and purified as a GST-fusion product (FIG. 116A). The recombinant protein was used to immunise mice, whose sera were used in a Western blot (FIG. 116B) and for FACS analysis.

[0995] These experiments show that cp6482 is a surface-exposed and immunoaccessible protein, and that it is a useful immunogen. These properties are not evident from the sequence alone.

### Example 117

[0996] The following C. pneumoniae protein (PID 4376486) was expressed <SEQ ID 233; cp6486>:

| | |
|---|---|
| 1 | VVVVALFILG IFFLSGSLAF LVHTSCGVLL GAALPILCIG LVLLAVALIV |
| 51 | FLCHKHKTRQ DLDYYDQDLD SLVIHKKEIP NDISELRVTF EKLQNLFQFH |
| 101 | TKDFSDLSQE LQGKFINCME KWLTLEDEVT KFLIVRDRFL ETRRNFTTFG |
| 151 | EQVKGIQSNI FDLHEEKSSL YLELYRLRKD LQVLLNFFLL PPGILKVDYD |
| 201 | EIEAIKGLFI RLTSRLDKLD VKAQERKKFI NEMSREFKEV EKAFDIVDRA |
| 251 | TKKLMDRAKK ESPARLFMGR TESLLEMKKN EEALKNQGLD PENLSHPELF |
| 301 | SPYQQLLILN YLNSEIVLHH YEFLISGTVT SGLTLEECEN RMRAASTGLN |
| 351 | ALLVRKLQFR GAIKSAYFEK LTEIEKELRS LQDVIKSLEL ELIKHIKDIV |
| 401 | TEET* |

[0997] The cp6486 nucleotide sequence <SEQ ID 234> is:

| | |
|---|---|
| 1 | GTGGTGGTTG TCGCTTTATT TATCCTTGGG ATTTTCTTTT TATCTGGTTC |
| 51 | TCTTGCATTC CTTGTTCATA CGTCTTGCGG AGTTCTTTTA GGAGCGGCGC |
| 101 | TTCCCATACT TTGCATAGGT CTTGTTTTAT TGGCTGTAGC TCTTATTGTT |
| 151 | TTCTTATGTC ACAAACACAA GACTCGTCAA GATTTAGATT ATTATGATCA |
| 201 | AGATTTAGAT TCTTTGGTGA TTCATAAGAA AGAGATCCCC AATGACATCT |
| 251 | CTGAGTTGCG GGTAACATTT GAAAAGTTGC AAAATCTGTT TCAGTTCCAT |
| 301 | ACGAAAGATT TCTCTGATCT AAGCCAAGAG CTTCAGGGTA AATTTATCAA |
| 351 | TTGCATGGAG AAATGGCTAA CTTTAGAAGA CGAAGTGACT AAATTTCTTA |
| 401 | TTGTTCGAGA TAGATTTTTA GAAACCAGAA GAAATTTTAC CACTTTTGGA |
| 451 | GAACAGGTTA AAGGGATCCA AAGCAATATT TTTGATTTGC ATGAGGAAAA |
| 501 | GTCTTCATTA TATTTAGAAT TGTATAGGCT TAGGAAAGAC CTCCAAGTTC |
| 551 | TATTAAATTT TTTTCTGCTC CCCCCAGGTA TACTCAAGGT AGATTATGAT |
| 601 | GAAATTGAGG CTATCAAAGG TCTGTTTATA AGATTAACCT CTAGATTAGA |
| 651 | TAAGCTTGAT GTGAAAGCTC AGGAACGTAA GAAGTTCATT AATGAAATGA |
| 701 | GTAGGGAATT TAAAGAAGTA GAGAAAGCTT TTGATATTGT CGATAGGGCA |
| 751 | ACAAAAAAGC TTATGGATAG AGCCAAGAAA GAAAGTCCGG CACGTCTTTT |
| 801 | CATGGGTAGA ACTGAGTCTC TCTTAGAAAT GAAAAAAAAT GAAGAAGCCC |
| 851 | TTAAAAATCA GGGGCTAGAT CCTGAAAATC TTTCCCATCC TGAACTTTTT |
| 901 | AGTCCGTATC AACAGCTTTT AATTTTGAAT TATTTAAATA GCGAAATAGT |
| 951 | TCTGCATCAT TATGAGTTCC TTATTTCTGG AACAGTAACT TCTGGCCTAA |
| 1001 | CTCTTGAAGA ATGTGAAAAT CGAATGAGGG CGGCTTCTAC TGGGTTGAAC |
| 1051 | GCCCTTCTGG TGCGTAAGCT CCAGTTCAGA GGTGCTATAA AATCTGCGTA |
| 1101 | TTTTGAAAAA CTCACAGAGA TTGAAAAAGA GTTACGATCA CTTCAAGACG |
| 1151 | TAATAAAGTC ATTGGAACTA GAACTGATCC ATAAGATAAA AGATATAGTG |
| 1201 | ACAGAAGAAA CTTAG |

[0998] The PSORT algorithm predicts inner membrane (0.7474).

[0999] The protein was expressed in E. coli and purified as a GST-fusion product (FIG. 117A). The recombinant protein was used to immunise mice, whose sera were used in a Western blot (FIG. 117B) and for FACS analysis.

[1000] These experiments show that cp6486 is a surface-exposed and immunoaccessible protein, and that it is a useful immunogen. These properties are not evident from the sequence alone.

### Example 118

[1001] The following C. pneumoniae protein (PID 4376526) was expressed <SEQ ID 235; cp6526>:

| | |
|---|---|
| 1 | MSPFKKIVNR LLCYISFQKE SRTLPIIIRE PRMTTKSLGS FNSVISKNKI |
| 51 | HFISLGCSRN LVDSEVMLGI LLKAGYESTN EIEDADYLIL NTCAFLKSAR |
| 101 | DEAKDYLDHL IDVKKENAKI IVTGCMTSNH KDELKPWMSH IHYLLGSGDV |
| 151 | ENILSAIESR ESGEKISAKS YIEMGEVPRQ LSTPKHYAYL KVAEGCRKRC |
| 201 | AFCIIPSIKG KLRSKPLDQI LKEFRILVNK SVKEIILIAQ DLQDYGKDLS |
| 251 | TDRSSQLESL LHELLKEPGP YWLRMLYLYP DEVSDGIIDL MQSNPKLLPY |
| 301 | VDIPLQHIND RILKQMRRTT SREQILGFLE KLRAKVPQVY IRSSVIVGFP |
| 351 | GETQEEFQEL ADFIGEGWID NLGIFLYSQE ANTPAAELPD QIPEKVKESR |
| 401 | LKILSQIQKR NVDKHNQKLI GEKIEAVIDN YHPETNLLLT ARFYGQAPEV |
| 451 | DPCIIVNEAK LVSHFGERCF IEITGTAGYD LVGRVVKKSQ NQALLKTSKA |
| 501 | * |

[1002] The cp6526 nucleotide sequence <SEQ ID 236> is:

| | |
|---|---|
| 1 | ATGAGTCCTT TTAAGAAAAT AGTAAATCGC TTACTATGCT ATATTTCTTT |
| 51 | TCAAAAAGAA TCAAGAACTC TCCCAATCAT TATTAGAGAA CCTAGGATGA |
| 101 | CAACAAAAAG TTTAGGATCT TTCAATTCAG TTATTTCCAA AAATAAAATT |
| 151 | CATTTTATTA GTTTGGGATG CTCTCGGAAC CTTGTAGATA GCGAAGTCAT |
| 201 | GCTAGGCATT CTTCTTAAGG CAGGTTACGA GTCTACTAAT GAAATTGAAG |
| 251 | ATGCTGACTA TTTAATTTTA AATACCTGTG CGTTTTTAAA AAGTGCTAGA |
| 301 | GATGAAGCTA AAGATTATCT AGACCATCTA ATTGATGTAA AAAAAGAGAA |
| 351 | CGCTAAAATT ATTGTAACTG GATGCATGAC TTCCAACCAC AAAGATGAGC |
| 401 | TTAAACCCTG GATGTCACAC ATCCATTACC TACTAGGTTC TGGGGATGTT |
| 451 | GAGAATATTC TTTCTGCTAT TGAGTCTCGT GAATCTGGAG AAAAAATCTC |
| 501 | TGCAAAGAGT TACATTGAGA TGGGAGAAGT TCCAAGACAG CTTTCCACAC |
| 551 | CAAAACACTA TGCCTATTTA AAAGTTGCTG AGGGCTGTAG AAAACGTTGT |
| 601 | GCTTTTTGTA TTATTCCTTC CATTAAAGGA AAGCTCCGCA GCAAACCTCT |
| 651 | GGATCAAATT CTTAAAGAAT TCCGCATCCT TGTAAACAAG AGTGTGAAAG |
| 701 | AGATTATATT GATAGCTCAA GACCTAGGAG ATTATGGAAA GGATCTCTCT |
| 751 | AGAGACCGCA GTTCGCAGCT AGAATCACTA TTACATGAGT TACTGAAAGA |
| 801 | GCCTGGTGAT TATTGGCTGC GGATGTTGTA TTTATATCCT GATGAAGTGA |
| 851 | GTGATGCCAT TATAGATCTT ATGCAATCTA ATCCCAAACT TCTTCCCTAT |
| 901 | GTAGATATTC CCTTACAGCA CATTAACGAC CGTATTTTAA AGCAAATGCG |
| 951 | AAGAACGACT TCTAGGGAGC AAATCCTAGG ATTCCTAGAA AAATTACGTG |
| 1001 | CCAAGGTTCC TCAGGTCTAT ATCCGTTCTT CTGTTATTGT GGGTTTCCCC |
| 1051 | GGTGAAACTC AGGAAGAATT CCAGGAGTTA GCTGATTTTA TTGGTGAGGG |
| 1101 | TTGGATTGAT AATCTCGGAA TTTTCTTGTA CTCTCAAGAA GCGAATACCC |
| 1151 | CGGCAGCAGA ACTCCCTGAC CAGATACCAG AAAAAGTTAA AGAATCGAGG |
| 1201 | TTGAAAATTC TATCTCAAAT TCAGAAACGC AATGTGGATA AACATAATCA |
| 1251 | GAAGCTCATT GGGGAAAAAA TAGAAGCAGT TATTGATAAC TATCATCCTG |
| 1301 | AAACGAATCT TTTACTCACT GCAAGGTTCT ATGGACAAGC TCCTGAAGTG |
| 1351 | GACCCTTGTA TTATTGTAAA TGAGGCGAAG CTTGTTTCTC ATTTTGGAGA |
| 1401 | AAGATGCTTT ATAGAAATCA CAGGGACTGC TGGTTACGAC CTTGTAGGGC |
| 1451 | GTGTTGTAAA AAAATCTCAG AACCAAGCTT TGCTAAAAAC TAGCAAAGCT |
| 1501 | TAG |

[1003] The PSORT algorithm predicts cytoplasm (0.1296).

[1004] The protein was expressed in E. coli and purified as a GST-fusion product (FIG. 118A) and also as a his-tagged product. The recombinant proteins were used to immunise mice, whose sera were used in a Western blot (FIG. 118B) and for FACS analysis.

[1005] These experiments show that cp6526 is a surface-exposed and immunoaccessible protein, and that it is a useful immunogen. These properties are not evident from the sequence alone.

### Example 119

[1006] The following C. pneumoniae protein (PID 4376528) was expressed <SEQ ID 237; cp6528>:

| | |
|---|---|
| 1 | MKNNINNNEC YFKLDSTVDG DLLAANLKTF DTQAQGISST ETFSVQGNAT |
| 51 | FKDQVSATGL TSGTTYNLNA QNFTSSQISI DFKNNRLSNC ALPKEDCDPV |
| 101 | PANYVRSPEY FFCSKPLIGD FDFNSGESYL PLTGSEYTLY QSRNVNSIFR |
| 151 | FIGWKQSTRE LTVGGNTAIQ FLAAGTYIVS FTVGKRWGWN NGWGGAIYIN |
| 201 | NGLGQVQCES TIYSGGGYAT IGTLGTSIYR ASVDVAPNPN DPNASDRYRA |
| 251 | GIFYLSNGGS SAGIGNYSFS LLYYPDDRG* |

[1007] The cp6528 nucleotide sequence <SEQ ID 238> is:

| | |
|---|---|
| 1 | ATGAAAAACA ATATTAATAA TAATGAGTGC TATTTTAAAT TAGACTCAAC |
| 51 | TGTAGATGGT GATTTGTTAG CAGCCAATCT CAAGACCTTT GATACACAGG |
| 101 | CCCAAGGAAT CTCATCGACT GAAACATTTT CTGTTCAGGG GAATGCAACA |
| 151 | TTTAAAGATC AAGTTTCAGC AACTGGATTA ACTTCAGGAA CTACTTATAA |
| 201 | TTTAAATGCA CAAAACTTTA CTTCCTCCCA AATCTCTATA GATTTTAAAA |
| 251 | ATAATCGTCT GAGTAATTGT GCATTGCCAA AAGAAGACTG CGATCCGGTG |
| 301 | CCAGCGAATT ATGTTCGTTC TCCCGAATAT TTTTTCTGTT CCAAGCCTCT |
| 351 | GATCGGAGAT TTTGATTTTA ACTCAGGGGA ATCTTATTTG CCTCTGACTG |
| 401 | GTTCGGAATA TACTCTATAT CAGTCACGTA ATGTAAATAG TATATTTCGT |
| 451 | TTTATAGGAT GGAAGCAAAG TACACGAGAA TTAACTGTAG GGGGAAATAC |
| 501 | TGCGATACAA TTTCTTGCAG CAGGAACCTA TATCGTTTCA TTTACTGTTG |
| 551 | GTAAACGGTG GGGATGGAAT AATGGTTGGG GAGGAGCCAT TTATATCAAT |
| 601 | AATGGTTTAG GACAAGTCCA ATGTGAAAGC ACGATTTATA GTGGTGGAGG |
| 651 | GTATGCAACA ATAGGTACAC TGGGGACCTC AATATATAGA GCCTCTGTAG |
| 701 | ATGTAGCTCC TAATCCTAAT GATCCGAATG CTTCGGATCG CTATAGAGCG |
| 751 | GGTATTTTCT ATCTCAGTAA CGGTGGTTCT AGTGCAGGTA TAGGGAATTA |
| 801 | CTCCTTTTCT CTTCTCTATT ATCCGGACGA TAGAGGGTAG |

[1008] The PSORT algorithm predicts cytoplasm (0.1668).

[1009] The protein was expressed in E. coli and purified as a GST-fusion product (FIG. 119A). The recombinant protein was used to immunise mice, whose sera were used in a Western blot (FIG. 119B) and for FACS analysis.

[1010] These experiments show that cp6528 is a surface-exposed and immunoaccessible protein, and that it is a useful immunogen. These properties are not evident from the sequence alone.

### Example 120

[1011] The following C. pneumoniae protein (PID 43376627) was expressed <SEQ ID 239; cp6627>:

| | |
|---|---|
| 1 | MKCSPLTLVP HIFLKNDCEC HRSCSLKIRT IARLILGLVL ALVSALSFVF |
| 51 | LAAPISYAIG GTLALAAIVI LIITLVVALL AKSKVLPIPN ELQKIIYNRY |
| 101 | PKEVFYFVKT HSLTVNELKI FINCWKSGTD LPPNLHKKAE AFGIDILKSI |
| 151 | DLTLFPEFEE ILLQNCPLYW LSHFIDKTES VAGEIGLNKT QKVYGLLGPL |
| 201 | AFHKGYTTIF HSYTRPLLTL ISESQYKFLY SKASKNQWDS PSVKKTCEEI |
| 251 | FKELPHNMIF RKDVQGISQF LFLFFSHGIT WEQAQMIQLI NPDNWKMLCQ |
| 301 | FDKAGGHCSM ATFGGFLNTE TNMFDPVSSN YEPTVNFMTW KELKVLLEKV |
| 351 | KESPMHPASA LVQKICVNTT HHQNLLKRWQ FVRNTSSQWT SSLPQYAFHA |
| 401 | QTYKLEKKIE SSLPIRSSL* |

[1012] The cp6627 nucleotide sequence <SEQ ID 240> is:

| | |
|---|---|
| 1 | ATGAAGTGTA GTCCTTTAAC ACTAGTTCCC CATATATTTT TAAAAAATGA |
| 51 | CTGCGAATGT CATAGATCTT GTTCTTTAAA AATTAGGACA ATTGCCCGAC |
| 101 | TCATTCTTGG GCTTGTTCTA GCTCTTGTTA GCGCACTTTC TTTTGTTTTC |
| 151 | CTTGCTGCGC CGATTAGCTA TGCTATTGGA GGAACTTTAG CTTTAGCCGC |
| 201 | TATCGTAATC TTGATTATAA CGCTAGTCGT AGCACTGCTA GCTAAATCAA |
| 251 | AGGTTCTGCC CATCCCCAAC GAACTTCAGA AGATTATTTA CAATCGCTAT |
| 301 | CCTAAAGAAG TCTTTTATTT CGTGAAAACA CACTCCCTGA CTGTTAACGA |
| 351 | ATTAAAAATA TTTATTAATT GCTGGAAAAG CGGTATAGAC CTGCCTCCGA |
| 401 | ATTTACATAA AAAAGCAGAG GCTTTCCGGA TCGATATTCT AAAATCTATA |
| 451 | GATTTAACCC TGTTTCCAQA GTTCGAAGAG ATTCTTCTTC AAAACTGCCC |
| 501 | GTTATACTGG CTCTCCCATT TTATAGACAA AACTGAATCT GTTGCTGGGG |
| 551 | AAATCGGATT AAATAAAACA CAAAAAGTTT ATGGTTTACT TGGGCCCTTA |
| 601 | GCGTTTCATA AAGGATATAC AACTATTTTC CACTCTTATA CACGCCCTCT |
| 651 | ACTAACATTA ATCTCAGAAT CACAGTATAA GTTCCTATAT AGTAAAGCGT |
| 701 | CTAAGAATCA ATGGGATTCT CCTTCTGTGA AAAAAACCTG CGAAGAAATA |
| 751 | TTCAAGGAAC TCCCCCACAA TATGATTTTC CGGAAGGATG TTCAAGGAAT |
| 801 | CTCACAATTC TTATTTCTTT TCTTTTCTCA TGGTATCACT TGGGAACAGG |
| 851 | CTCAGATGAT TCAACTTATA AATCCTGATA ATTGGAAAAT GTTGTGTCAG |
| 901 | TTTGATAAAG CAGGAGGOCA CTGTTCCATG GCAACATTTG GAGGCTTTTT |
| 951 | GAATACTGAA ACAAATATGT TCGATCCAGT ATCCTCTAAC TATGAACCTA |
| 1001 | CAGTGAACTT CATGACGTGG AAAGAATTGA AGGTTTTACT AGAGAAAGTA |
| 1051 | AAAGAAAGTC CTATGCACCC AGCGAGTGCT CTTGTTCAGA AGATATGCGT |
| 1101 | AAATACAACG CACCATCAAA ATCTGTTAAA ACGATGGCAA TTTGTTCGTA |
| 1151 | ATACGAGTTC ACAATGGACA TCAAGCTTAC CTCAGTATGC TTTCCACGCC |
| 1201 | CAAACCTACA AACTAGAGAA AAAAATAGAA AGCAGTCTCC CTATACGATC |
| 1251 | TTCCCTATAA |

[1013] The PSORT algorithm predicts inner membrane (0.7198).

[1014] The protein was expressed in E. coli and purified as a GST-fusion product (FIG. 120A). The recombinant protein was used to immunise mice, whose sera were used in a Western blot (FIG. 120B) and for FACS analysis.

[1015] These experiments show that cp6627 is a surface-exposed and immunoaccessible protein, and that it is a useful immunogen. These properties are not evident from the sequence alone.

### Example 121

[1016] The following C. pneumoniae protein (PID 4376629) was expressed <SEQ ID 241; cp6629>:

| | |
|---|---|
| 1 | MSNITSPVIQ NNRSCNYYFE LKNSTTIHIV ISAILLCGAL IAFLCVAAPV |
| 51 | SYILSGALLG LGLLIALIGV ILGIKKITPM ISSKEQVFPQ ELVNRIRAHY |
| 101 | PKFVSDFVSE AKPNLKDLIS FIDLLNQLHS EVGSSTNYNV SEELQQKIDT |
| 151 | FEGIARLKNE VRTASLKRLE SAASSRPLFP SLPKXLQKVF PFFWLGEFIS |
| 201 | AGSKVVELHR VKKIGGSLEE DLSDYIKPEM LPTYWLIPLD FRPTNSSILN |
| 251 | LHTLVLARVL TRDVFQHLKY AALNGEWNLN HSDLNTMCQQ LFAKYHAAYQ |
| 301 | SYKHLSQPSL QEDEFYNLLL CIFKHRYSWK QMSLIKTVPA DLWENLCCLT |
| 351 | LDHTGRPQDM EFASLIGTLY TQGLIHKESE AFLSSLTLLS LDQFKTIRRQ |
| 401 | STNIAMFLEN LATHNSTFRS LPPITVHPLK RSVFSQPEED ESSLLIG* |

[1017] The cp6629 nucleotide sequence <SEQ ID 242> is:

| | |
|---|---|
| 1 | ATGAGTAATA TAACCTCGCC AGTTATTCAA AATAATCGCT CTTGTAATTA |
| 51 | TTATTTTGAA TTAAAGAATT CAACCACTAT TCATATTGTT ATCAGTGCCA |
| 101 | TCTTACTCTG CGGAGCTTTG ATAGCTTTCT TGTGTGTAGC AGCTCCTGTT |
| 151 | TCCTATATTC TAAGTGGCGC ATTGTTAGGA TTAGGATTAT TAATAGCCTT |
| 201 | GATTGGTGTG ATTTTAGGAA TAAAAAAAAT CACGCCTATG ATTTCATOAA |
| 251 | AAGAACAAGT ATTCCCCCAA GAACPCGTAA ATAGAATCAG GGCGCACTAT |
| 301 | CCTAAATTTG TCTCTGATTT TGTTTCAGAA GCTAAACCAA ATCTTAAAGA |
| 351 | TCTCATAAGT TTTATTGATC TTCTAAATCA ATTGCACTCT GAAGTTGGAT |
| 401 | CATCTACAAA TTACAACGTA TCTGAAGAAC TACAACAGAA AATAGATACG |
| 451 | TTCGAGGGTA TCGCACQCTT AAAAAATGAA GTCCGTACTG CTTCTCTTAA |
| 501 | AAGACTTGAA AGCGCTGCTT CTTCCCGTCC CCTCTTCCCC TCTTTACCAA |
| 551 | AAATCTTACA AAAGGTATTT CCATTTTTCT GGTTAGGAGA GTTTATTTCT |
| 601 | GCAGGCAGCA AGGTTGTAGA GCTCCATCGA GTTAAGAAAA TTGGAGGCAG |
| 651 | CCTCGAAGAA GACCTTAGTG ATTATATAAA ACCAGAGATG CTTCCTACCT |
| 701 | ATTGGTTGAT TCCTTTAGAT TTTAGACCAA CAAATTCCTC TATTCTAAAT |
| 751 | CTACACACAT TAGTTTTAGC TAGAGTCTTA ACTCGTGATG TTTTTCAACA |
| 801 | TCTTAAGTAT GCAGCATTAA ATGGCGAGTG GAACCTGAAT CATAGTGATC |
| 851 | TAAATACTAT GAAACAGCAG CTCTTTGCTA AATATCATGC GGCGTATCAA |
| 901 | TCCTATAAAC ATCTATCTCA ACCCTCTCTT CAAGAGGATG AATTCTATAA |
| 951 | CCTGCTCTTG TGTATTTTTA AGCATAGGTA CTCGTGGAAG CAGATGTCCT |
| 1001 | TAATAAAAAC AGTCCCGGCT GATTTATGGG AAAACCTCTG TTGCTTGACT |
| 1051 | TTAGACCATA CAGGACGACC CCAAGACATG GAATTTGCCT CTCTAATTGG |
| 1101 | TACTCTCTAC ACACAAGGCC TAATTCATAA AGAAAGCGAA GCATTTCTTT |
| 1151 | CTTCATTGAC ACTCCTTAGT TTAGATCAGT TTAAAACGAT CCGTCGTCAG |
| 1201 | TCAACCAATA TAGCGATGTT CCTTGAGAAT TTAGCAACTC ATAATTCCAC |
| 1251 | CTTTAGAAGC TTACCACCTA TAACAGTCCA TCCACTCAAG AGAAGCGTCT |
| 1301 | TCTCCCAACC TGAAGAAGAC GAGTCCTCCC TGCTGATAGG TTAG |

[1018] The PSORT algorithm predicts inner membrane (0.5776).

[1019] The protein was expressed in E. coli and purified as a GST-fusion product (FIG. 121A). The recombinant protein was used to immunise mice, whose sera were used in a Western blot (FIG. 121B) and for FACS analysis.

[1020] These experiments show that cp6629 is a surface-exposed and immunoaccessible protein, and that it is a useful immunogen. These properties are not evident from the sequence alone.

### Example 122

[1021] The following C. pneumoniae protein (PID 4376732) was expressed <SEQ ID 243; cp6732>:

| | |
|---|---|
| 1 | MEMMSPFQQP EQCHFDVVGS FLRPESLTRA RSDGEEGRIV YEQMRVVEDA |
| 51 | AIRNLIKKQT EAGLIFFTDG EFRRYSWDFW FMWGFHGVDR RRDSNDPEIG |
| 101 | VYLKDKISVS KHPFIEHFEF VKTFEKGNAK AKQTIPSPSQ FFHEMIFAPN |
| 151 | LKNTRKFYPT NQELIDDIVF YYRQVIQDLY AAGCRNLQLD DCAWCRLLDI |
| 201 | RAPSWYGVDS HDRLQEILEQ FLWIHNLVMK DRPEDLFVSL HVCRGDYQAE |
| 251 | FFSRRAYDSI EEPLFAKTDV DSYHYYWALD DKYSGGAEPL AYVSGEKHVC |
| 301 | LGLISSNHSC IEDRDAVVSR IYEAASYIPL ERLSLSPQCG FASCEGDHRM |

[1022] The cp6732 nucleotide sequence <SEQ ID 244> is:

| | |
|---|---|
| 1 | ATGGAAATGA TGAGCCCATT CCAACAACCT GAGCAATGTC ATTTTGATGT |
| 51 | TCTGGGAAGT TTCTTACGTC CTGAAAGTCT TACACGAGCA CGCTCTGATT |
| 101 | TTGAAGAAGG AAGAATTGTC TATGAGCAGA TGCGAGTTGT CGAAGATGCT |
| 151 | GCTATTCGTA ATCTCATAAA AAAGCAAACA GAAGCAGGTC TTATCTTTTT |
| 201 | TACTGATGGG GAATTCCGTA GGTATAGTTG GGATTTCGAC TTTATGTGGG |
| 251 | GATTCCATGG CGTGGATCGT CGCAGGGACT CTAATGACCC TGAAATTGGA |
| 301 | GTGTATCTTA AAGATAAAAT CTCCGTATCA AAACATCCGT TTATAGAACA |
| 351 | TTTCGAGTTT GTCAAAACTT TTGAGAAGGG AAATGCAAAA GCAAAACAAA |
| 401 | CGATTCCTTC TCCATCACAA TTTTTCCATG AGATGATTTT TGCTCCTAAT |
| 451 | CTGAAAAATA CTCGGAAGTT TTATCCTACG AATCAAGAGC TAATTGATGA |
| 501 | TATTGTCTTT TATTATCGCC AAGTCATCCA AGATCTTTAT GCTGCAGGTT |
| 551 | GTCGTAATTT GCAGTTGGAC GATTGTGCTT GGTGTCGCCT CTTGGATATA |
| 601 | CGAGCGCCTT CTTGGTATGG TGTTGATTCT CATGACAGGT TGCAGGAAAT |
| 651 | TTTAGAACAG TTTTTATGGA TCCATAATTT AGTGATGAAG GATAGACCCG |
| 701 | AGGATCTTTT TGTAAGTCTG CATGTCTGTC GTGGTGATTA TCAGGCCGAG |
| 751 | TTTTTCTCTA GACGAGCTTA TGATTCTATA GAGGAGCCTT TATTTGCTAA |
| 801 | GACCGATGTG GATAGTTATC ACTATTATTG GGCTCTTGAT GATAAGTATT |
| 851 | CAGGAGGTGC TGAGCCTTTA GCTTACGTCT CTGGAGAGAA ACACGPCTGC |
| 901 | TTGGGATTGA TCTCCAGCAA CCATTCTTGT ATTGAAGATC GAGATGCTGT |
| 951 | GGTTTCTCGT ATTTATGAAG CTGCGAGCTA CATTCCCTTA GAGAGACTTT |
| 1001 | CTTTGAGCCC GCAATGTGGG TTTGCTTCTT GTGAGGGAGA CCATAGAATG |
| 1051 | ACTGAAGAAG AACAGTGGAA GAAGATCGCC TTTGTGAAAG AGATTGCTAA |
| 1101 | AGAGATCTGG GGATAA |

[1023] The PSORT algorithm predicts cytoplasm (0.2196).

[1024] The protein was expressed in E. coli and purified as a GST-fusion product (FIG. 122A). The recombinant protein was used to immunise mice, whose sera were used in a Western blot (FIG. 122B) and for FACS analysis.

[1025] These experiments show that cp6732 is a surface-exposed and immunoaccessible protein, and that it is a useful immunogen. These properties are not evident from the sequence alone.

### Example 123

[1026] The following C. pneumoniae protein (PID 4376738) was expressed <SEQ ID 245; cp6738>:

| | |
|---|---|
| 1 | VWLRFLLLVS YDEKEKDVVV VCNHSEPNIL GLPPEAVSQL IEELSDEGYS |
| 51 | YLNVVRCDLS GETTVQQRLL LNADEGRSMT VVISELPEGH PDIRNLQLAS |
| 101 | ERIFVSREKE AADAYASGCK VVAFDDEHLP WVSSHIAYAE EIREKQEQTM |
| 151 | QGSLTEEQLG ALLCNTVSTE KNLAFALDAV IKQSVWRFRN PDLFAYEREA |
| 201 | LEASVTDALV SYVSNLDMIP YTSSQGIVIE DSSIVRTSQE HTLXVNCAAF |
| 251 | DKLASQIEFL CPSDVLPISG KDPLISDDED EELNPKVSSA ADSKDKT* |

[1027] The cp6738 nucleotide sequence <SEQ ID 246> is:

| | |
|---|---|
| 1 | GTGTGGCTGC GCTTTTTACT TTTAGTGTCC TATGATGAGA AGGAGAAAGA |
| 51 | CGTAGTTGTC GTTTGTAATC ATTCTGAACC TAATATCCTC GGCCTGCCTC |
| 101 | CTGAAGCAGT CTCTCAGCTT ATTGAAGAGC TTAGCGATGA AGGCTATAGC |
| 151 | TATCTGAATG TAGTGCGTTG TGATCTCTCC GOGGACACTA CGGTTCAACA |
| 201 | ACGTCTGCTA TTGAATGCCG ATGAAGGGAG ATCTATGACG GTGGTGATCT |
| 251 | CAGAGCTTCC TGAAGGGCAC CCCGATATTC GGAATTTGCA GTTGGCATCC |
| 301 | GAAAGAATTT TTGTTTCTCG TGAAAAAGAA GCTGCTGATG CCTATGCTTC |
| 351 | AGGATGTAAA GTGGTCGCTT TCGATQATGA GCATCTCCCT TGGGTOTCCA |
| 401 | GTCATATTGC CTACGCGGAG GAGATCAGAG AGAAACAAGA ACAAACAATG |
| 451 | CAAGGGTCTT TAACTGAAGA GCAGTTAGGA GCACTCCTCT GCAACACAGT |
| 501 | CTCCACAGAG AAAAATCTAG CCTTTGCTTP AGACGCCGTG ATAAAACAGT |
| 551 | CTGTGTGGAG ATTCCGCAAT CCGGATCTTT TTGCTTATGA GAGAGAAGCT |
| 601 | CTAGAGGCTT CAGTAACAGA TGCTTTAGTA TCTTACGTTT CAAATTTAGA |
| 651 | CATGATACCG TACACAAGTT CTCAGGGCAT AGTCATAGAA GATAGTAGTA |
| 701 | TCGTCCGTAC CTCTCAAGAG CATACACTCA TTGTGAACTG TGCAGCATTC |
| 751 | GATAAGTTAG CGAGCCAAAT AGAGTTCTTA TGCCCCAGTG ACGTGTTGCC |
| 801 | CATTTCTGGT AAAGACCCTT TGATTTCTGA TGATGAGGAT GAGGAACTGA |
| 851 | ATCCTAAAGT TTCATCTGCT GCAGACTCTA AAGATAAAAC CTAG |

[1028] The PSORT algorithm predicts cytoplasm (0.1587).

[1029] The protein was expressed in E. coli and purified as a GST-fusion product (FIG. 123A). The recombinant protein was used to immunise mice, whose sera were used in a Western blot (FIG. 123B) and for FACS analysis.

[1030] These experiments show that cp6738 is a surface-exposed and immunoaccessible protein, and that it is a useful immunogen. These properties are not evident from the sequence alone.

### Example 124

[1031] The following C. pneumoniae protein (PID 4376739) was expressed <SEQ ID 247; cp6739>:

| | |
|---|---|
| 1 | MTHCLHGWFS VVRHHFVQAF NFSRPLYSRI THFALGVIKA IPIVGHLVMG |
| 51 | VDWLISHCFE RGVSHPGFPS DIAPILKVEK IAGRDHISRI ENQLKSLRKT |
| 101 | IEVEDLDKVH GQYQENPYAD MASSEVLKLD KGVHVSELGK AFSRVRNRIT |
| 151 | RSYSYAPTPQ LDSIAIVGID LVSPEEQENI VRLANEVIQL YPKSKTTLYL |
| 201 | LIDFNKEWVG DISSDKEKQL RSLGLHSEVQ CLSVLEPQGA EGEDTKHFDL |
| 251 | MVGCYGKDSY LREGKILQQL LGTSLGTVPW VNVMHTLPSR YRSRLSLPIN |
| 301 | TEKDKTELYK EISRTHHQLH TLGMGLGAQD SGLLLDRQRL HAPLSQGSHC |
| 351 | HSYLADLTHE ELKILLFSAF VDAKNISKKE LREVSLNFAN DTSVECGCAF |
| 401 | YF* |

[1032] The cp6739 nucleotide sequence <SEQ ID 248> is:

| | |
|---|---|
| 1 | ATGACTCATT GCTTACATGG TTGGTTTTCT GTAGTTCGTC ATCACTTTGT |
| 51 | GCAGGCGTTT AATTTCTCAC GTCCTTTATA TTCTCGAATT ACCCACTTCG |
| 101 | CTTTAGGGGT GATTAAGGCC ATCCCCATTG TAGGGCATCT TGTTATGGGA |
| 151 | GTCGATTGGT TGATCTCTCA TTGCTTCGAG AGGGGAGTCT CACACCCTGG |
| 201 | GTTCCCTTCA GATATTGCTC CTATACTGAA AGTAGAAAAG ATCGCGGGCC |
| 251 | GAGATCATAT TTCTAGAATC GAAAATCAGC TAAAGAGCCT TAGGAAAACT |
| 301 | ATCGAGGTTG AAGATCTAGA TAAAGTCCAC GGGCAATATC AAGAGAATCC |
| 351 | TTATGCAGAT ATGGCCTCTA GTGAGGTTCT TAAACTCGAT AAGGGAGTTC |
| 401 | ATGTTAGCGA GCTTGGCAAA GCCTTTTCTA GAGTTCGCAA TCGCATCACC |
| 451 | AGATCCTATA GTTATGCCCC TACTCCTCAG TTGGACTCTA TAGCTATTGT |
| 501 | TGGTATAGAT CTCGTCAGTC CTGAAQAACA AGAGAATTTA GTACGCTTGG |
| 551 | CGAATGAGGT CATTCAACTC TATCCCAAAT CAAAGACAAC TCTATATCTT |
| 601 | CTTATCGATT TTAATAAGGA GTGGGTAGGG GATATCTCCT CTGATAAGGA |
| 651 | AAAACAGCTC CGTTCTCTAG GTCTACATTC TGAAGTTCAG TGTCTTTCCG |
| 701 | TCTTGGAACC TCAGGGTGCC GAGGGCGAAG ATACGAAACA CTTTGACCTT |
| 751 | ATGGTCGGCT GTTATGGGAA GGATTCTTAC TTAAGGGAGG GTAAAATTTT |
| 801 | ACAGCAGGCC CTAGGGACTT CGTTAGGTAC TGTTCCCTGG GTGAATGTTA |
| 851 | TGCACACATT GCCATCTAGG TATAGATCTC GGCTTTCCTT ACCTATAAAT |
| 901 | ACCGAAAAGG ATAAGACAGA GCTTTATAAA GAGATTTCTC GTACACACCA |
| 951 | TCAGTTGCAT ACTTTGGGAA TGGGACTTGG AGCCCAGGAT TCAGGATTGC |
| 1001 | TCTTAGACCG GCAACGACTC CATGCTCCTT TATCTCAAGG GTCTCACTGC |
| 1051 | CATTCCTATC TTGCAGATCT CACCCATGAA GAGCTGAAAA TTTTGTTATT |
| 1101 | TTCAGCATTT GTGGATGCTA AGAACATAAG TAAGAAAGAG CTTCGTGAGG |
| 1151 | TATCTCTAAA TTTTGCTAAC GATACTTCCG TAGAGTGTGG CTGCGCTTTT |
| 1201 | TACTTTTAG |

[1033] The PSORT algorithm predicts inner membrane (0.2190).

[1034] The protein was expressed in E. coli and puifled as a GST-fusion product (FIG. 124A). The recombinant protein was used to immunise mice, whose sera were used in a Western blot (FIG. 124B) and for FACS analysis.

[1035] These experiments show that cp6739 is a surface-exposed and immunoaccessible protein, and that it is a useful immunogen. These properties are not evident from the sequence alone.

### Example 125

[1036] The following C. pneumoniae protein (PID 4376741) was expressed <SEQ ID249; cp6741>:

| | |
|---|---|
| 1 | MASCLSAWFS IVREHFYRAF DFSLPFCARI TEFVLGVIKG |
| | IPVVGHIIVG |
| 51 | IEWLVSRYLE SFVTKPTFVS DVVSLLKTEK VAGRDHIARV |
| | VETLKRQRVA |
| 101 | VAPEDEDKVH GKIPVHPFGG IQPVEVLTLY PEVQDATLGL |
| | AFSKIRNRVR |
| 151 | QAYLQAPRPK LQKIYIIGND MNPFEVDDFL HLARLCNETQ |
| | RLYPDATISL |
| 201 | YLTASGGRNA MDKKNRRLLS DCELNPKIAC LDFNQGDVVK |
| | QATCDCWMVY |
| 251 | HGENDQGTLN QIQEELEKSG EETPWIHVGQ KPLSQBLNDF |
| | SPFSSLEMKG |
| 301 | DKEKALEYSE LEKEQLYSRL VYVGERSSVL SLGFGDSRSG |
| | ILMDPKRVHA |
| 351 | PLSEGHYCHS YLADLEWPGL QKTILAAPLN PKELSSTILQ |
| | PISLNLILNS |
| 401 | KTYLRQHPGF FERNSRSDRN VVVVVCDSWW GTDWKEEPSF |
| | QHFIMELECR |
| 451 | GYSHFNIFAF RSNSMCVEER RILNESSQEK AFTMIFCEDS |
| | VSQGDIRCLH |
| 501 | LASEGMLCGK ECYAVDVYTS GCANFMMEEV LTLERESNLW |
| | NRKHGLWKRE |
| 551 | VRKQKQEAAL DQDESEIYVC NQLTAQQNPA CS* |

[1037] The cp6741 nucleotide sequence <SEQ ID 250> is:

| | |
|---|---|
| 1 | ATGGCTTCTT GTTTATCTGC CTGGTTTTCT ATAGTTCGTG |
| | AGCACTTTTA |
| 51 | TCGAGCCTTT GATTTTTTCT TGCCGTTTTG TGCTCGTATT |
| | ACGGAATTTG |
| 101 | TATTAGGGGT CATCAAGGGG ATCCCTGTTG TGGGTCACAT |
| | TATTGTTGGG |
| 151 | ATAGAGTGGC TCGTTTCTAG GTATTTAGAG AGTTTCGTGA |
| | CCAAGCCGAC |
| 201 | ATTTGTCTCT GATGTGGTGA GTCTTCTGAA AACAGAGAAA |
| | GTTGCTGGTC |
| 251 | GCGATCACAT TGCTCGTGTh GTGGAGACTT TGAAGAGGCA |
| | GAGAGTCGCT |
| 301 | GTGGCTCCTG AAGATGAGGA TAAGGTCCAT GGGAAGATTC |
| | CTGTGCATCC |
| 351 | TTTCGGGGGA ATCCAACCTG TAGAAGTTCT CACTCTCTAT |
| | CCCGAAGTTC |
| 401 | AAGATGCAAC GTTAGGGCTT GCCTTCTCTA AAATTCGTAA |
| | TCGTGTAAGA |
| 451 | CAGGCGTATT TGCAAGCTCC ACGQCCAAAA CTGCAGAAGA |
| | TTTACATCAT |
| 501 | AGGAAACGAT ATGAATCCTT TTGAAGTTGA CGACTTCTTG |
| | CATCTAGCCC |
| 551 | GTCTCTGTAA TGAAACTCAA AGACTCTATC CTGACGCTAC |
| | GATTTCTCTA |
| 601 | TATCTAACAG CTTCTGGTGG TCGCAATGCT ATGGACAAAA |
| | AGAATCGGAA |
| 651 | GTTACTTAGT GATTGCGAAC TAAACCCCAA GATTGCTTGT |
| | TTGGACTTTA |
| 701 | ATCAGGGTGA TGTAGTCAAA CAAGCAACTT GTGACTGTTG |
| | GATGGTGTAT |
| 751 | CATGGGCAGA ATGATCAAGG TACGTTGAAT CAGATTCAGG |
| | AAGAGTTAGA |
| 801 | AAAGTCAGGG GAGGAAACCC CTTGGATTCA TGTGGGGCAA |
| | AAGCCTCTTT |
| 851 | CACAATCCTT GTGGGATTTC TCTCCATTTT CATCTTTGGA |
| | GATGAAGGGA |
| 901 | GATAAAGAGA AAGCTCTAGA GTACTCTGAA TTAGAAAAAG |
| | AACAGCTATA |
| 951 | TTCTCGATTG GTATACGTAG GAGAGCGCTC TTCGGTTCTT |
| | AGTTTGGGGT |
| 1001 | TTGGAGATAG TCGGGCAGGG ATCTTGATGG ACCCAAAACG |
| | GGTGCATGCT |
| 1051 | CCCTTATCTG AAGGGCATTA TTGTCATTCC TACCTTGCAG |
| | ACTTAGAAAA |
| 1101 | TCCCGGGTTA CAAAAAACAA TTTTAGCGGC ATTTCTGAAT |
| | CCTAAGGAGT |
| 1151 | TGAGCAGTAC CATACTGCAA CCTATATCTC TAAATCTTAT |
| | CTTAAATAGC |
| 1201 | AAAACTTACT TAAGGCAGCA CTTIGGCTTT TTTGAGAGGA |
| | TGAGCAGAAG |
| 1251 | TGATCGCAAT GTGGTTGTCG TTGTATGTGA TTCTTGGTGG |
| | GGTACCGACT |
| 1301 | GGAAGGAGGA GCCAAGCTTC CAACACTTTA TTATGGAGCT |
| | AGAGTGTCGA |
| 1351 | GGGTATTCGC ACTTCAATAT TTTTGCCTTT AGATCTAATA |
| | GCATGTGTGT |
| 1401 | AGAAGAACGT AGGATCTTAA ATGAAAGTTC TCAAGAGAAA |
| | GCCTTTACCA |
| 1451 | TGATTTTCTG TGAGGATTCA GTATCTCAAG GAGATATCCG |
| | CTGTTTGCAT |
| 1501 | TTGGCGTCTG AAGGAATGCT TTGTGGTAAA GAGTGCTATG |
| | CTGTCGATGT |
| 1551 | CTATACCTCA GGATGCCCGA ACTTTATGAT GGAAGAAGTC |
| | TTAACTTTGG |
| 1601 | AGCGAGAATC TAATCTGTGG AATAGAAAGC ATGGTCTTTG |
| | GAAAAGAGAA |
| 1651 | GTTAGAAAAC AGAAACAAGA AGCTGCTTTG GATCAAGACG |
| | AGAGCGAGAT |
| 1701 | TTACGTTTGT AATCAGCTGA CGGCGCAACA GAACTTCGCT |
| | TGTTCTTGA |

[1038] The PSORT algorithm predicts inner membrane (0.2869).

[1039] The protein was expressed in E. coli and purified as a GST-fusion product (FIG. 125A). The recombinant protein was used to immunise mice, whose sera were used in a Western blot (FIG. 125B) and for FACS analysis.

[1040] These experiments show that cp6741 is a surface-exposed and immunoaccessible protein, and that it is a useful immunogen. These properties are not evident from the sequence alone.

### Example 126

[1041] The following C. pneumoniae protein (PID 4376742) was expressed <SEQ ID 251; cp6742>:

| | |
|---|---|
| 1 | LFVSNFIFFV VMPIPYISSW ISTVRQHFVK AFDFSRPFCS |
| | RVTNFALGVI |
| 51 | KAIPIVGHIV MGGEWLVSSC VAGIITRSSF TSDVVQIVKT |
| | EKALGRDHIS |
| 101 | RVAEILQRER GTITPENQDK VHGKFPVCPF GRLKSEETLK |
| | LKPGEREGTL |
| 151 | DTVPSPIRTR VTRAYLQAPR PEIRTISIVG SKLKTPQDFS |
| | QFVSLANETQ |
| 201 | RLHPEALVCL YLTGLNRESQ MCDTTTAEKK QYLHNSGLDS |
| | RIQCKDSKBD |
| 251 | DAGSPENPEL WZGYYSREQQ HNIDGQYIQQ CLGKSADPIP |
| | WIHVTEDTKD |
| 301 | FYYPPNFTSY SHRTQSTDPT SPPRLPESEG DKDSLYGQLS |
| | RSYHHEYMLG |
| 351 | LGLKPEDAGL LMDPDRIYAP LSQGHYCHSY LADIENEDLR |
| | TLVLSPFLDP |
| 401 | GNLSSEDLRP VAFNIARLPL ELDSLEFRLV AGQQEGRNTV |
| | TLAHGTPRPE |
| 451 | DLDPDSMNIL TRRLQMSGYS YLNIFSYKSR KMIVKERQFF |
| | GDRSEGKSFT |
| 501 | LILPBDPISA ADFRCLQLAA EGMVARDLPS VADICASGCS |
| | CIQFSEMQSP |
| 551 | QAIEYRQWEA RVEDEAGEEA REPVIYSQDQ LSSHLTTQQN |
| | FVFSLDAVVK |
| 601 | QAIWRFRSKG LLTMERKALG EEFLTAIFSY LGSQERNENM |
| | GXRTTEEHBV |
| 651 | VISFEELDHM VQVLPAEVPA DSGNDPTRPV PNPDSNPDSS |
| | QNEGS* |

[1042] The cp6742 nucleotide sequence <SEQ ID 252> is:

| | |
|---|---|
| 1 | TTGTTTGTPT CTAATTTTAT TTTTTTTGTT GTTATGCCAA |
| | TTCCCTATAT |
| 51 | TTCTTCTTGG ATTTCTACCG TTCGACAGCA TTTTGTTAAG |
| | GCCTTTGATT |
| 101 | TCTCTCGTCC CTTTTGTTCT AGGGTTACGA ATTTTGCTTT |
| | AGGGGTCATC |
| 151 | AAGGCCATCC CTATTGTAGG ACATATTGTC ATGGGGATGG |
| | AGTGGTTAGT |
| 201 | TTCTTCCTGT GTTGCCGGGA TTATTACTAG GTCCTCCTTT |
| | ACCTCAGATC |
| 251 | TCGTTCAGAT TGTAAAGACT GAGAAGGCGT TAGGTCGAGA |
| | TCATATATCT |
| 301 | CGAGTGGCGG AGATATTGCA AAGAGAAAGG GGGACCATAA |
| | CTCCTGAGAA |
| 351 | TCAAGATAAG GTGCATGGGA AGTTTCCTGT CTGTCCTTTT |
| | GGTCGTTTAA |
| 401 | AATCCGAGGA AACTTTAAAA CTTAAGCCGG GACAAAGAGA |
| | GGGAACTTTA |
| 451 | GATACTGTAT TTTCTCCGAT TCGCACGCGC GTGACTCGTG |
| | CGTACTTACA |
| 501 | GGCCCCCCGA CCCGAAATAC GTACGATTTC TATTGTGGGT |
| | TCGAAACTTA |
| 551 | AAACTCCTCA AGATTTCTCG CAATTTGTGA GTCTCGCGAA |
| | TGAAACGCAG |
| 601 | AGACTGCATC CTGAAGCGTT AGTTTGTCTG AATTTGACAG |
| | GCTTGAATCG |
| 651 | CGAATCTCAG ATGTGCGATA CACCTACTGC AGAGAAGAAG |
| | CAGTACCTAC |
| 701 | ATAACTCAGG TCTCGACTCT AGAATCCAGT GCAAAGACAG |
| | TAAAGAAGAC |
| 751 | GACGCTGGCT CTCCTGAAAA TCCCGAACTT TGGATTGGCT |
| | ATTATTCACG |
| 801 | AGAGCAACAG CATAATATAG ACGGGCAGTA TATTCAGCAG |
| | TGTCTAGGGA |
| 851 | AGAGTGCAGA TCCAATTCCT TGGATTCATG TTACTGAAGA |
| | CACAAAGGAT |
| 901 | TTTTATTACC CACCAAACTT TACTTCATAC TCACATACAA |
| | GACAATCTAC |
| 951 | AGACCCAACA TCGCCACCAA GACTCCCTGA AAGTGAGGGG |
| | GATAAGGATT |
| 1001 | CCTTGTACGG ACAACTGAGT CGATCGTATC ACCATGAGTA |
| | TATGCTTGGT |
| 1051 | TTGGGATTAA AACCAGAGGA TGCAGGACTC CTGATGGACC |
| | CGGATAGAAT |
| 1101 | CTATGCTCCT CTATCCCAAG GGCATTATTG TCATTCCTAC |
| | CTTGCGGATA |
| 1151 | TAGAAAATGA GGATCTACGA ACTTTAGTCC TTTCGCCTTT |
| | CCTAGATCCT |
| 1201 | GGCAATCTTA GTAGCGAGGA TCTTCGTCCT GTAGCATTCA |
| | ATATCGCTAG |
| 1251 | ATTGCCATTA GAATGGGACT CGTTATTTTT CCGCCTTGTT |
| | GCGGGTCAGC |
| 1301 | AAGAAGGGAG AAACATAGTT ACCCTTGCCC ACGGAACTCC |
| | TCGTCCAGAA |
| 1351 | GATCTTGATC CTGACTCAAT GAACATTCTG ACCAGAAGAT |
| | TACAAATGTC |
| 1401 | TGGATATAGC TATTTGAACA TTTTCTCCTA TAAATCACGG |
| | AAAATGATTG |
| 1451 | TAAAAGAACG TCAGTTCTTT GGAGATCGTT CTGAAGGGAA |
| | GTCTTTCACA |
| 1501 | TTGATCTTAT TTGAGGATCC CATTAGTGCA GCAGATTTCC |
| | GTTGTTTGCA |
| 1551 | GCPAGCTCCA CAAGGTATGG TTCCTAAGGA TCTCCCCAGC |
| | GTAGCAGATA |
| 1601 | TTTGTGCCTC TGGATGTTCC TGCATTCAGT TTTCTGAGAT |
| | GCAGAGTCCT |
| 1651 | CAGGCTATTG AATATAGACA ATGGGAGGCA CGTGTCGAAG |
| | ATGAAGCAGG |
| 1701 | AGAAGAAGCC AGAGAACCAG TAATTTATTC TCAGGATCAA |
| | TTGAGCAGCA |
| 1751 | TGCTCACTAC ACAACAGAAT TTTGTATTTT CTCTAGATGC |
| | TGTGGTAAAA |
| 1801 | CAGGCGATCT GGAGATTCCG TTCGAAAGGT CTTCTTACTA |
| | TGGAAAGAAA |
| 1851 | GCCACTAGGC GAGGAGTTCT TAACTGCGAT ATTTTCCTAT |
| | TTAGGGAGTC |
| 1901 | AGGAGCGTAA TGAGAATATG GGGAAAAGAA CTACCGAAGA |
| | ACATGAGGTC |
| 1951 | GTTATCAGCT TCGAAGAGCT AGATCGCATG GTGCAAGTCC |
| | TCCCAGCCGA |
| 2001 | AGTCCCTGCA GATTCAGGCA ATGATCCTAC GCGTCCCGTT |
| | CCTAATCCAC |
| 2051 | ATAGTAACCC TGATTCCTCG CAAAATGAAG GCAGTTAG |

[1043] The PSORT algorithm predicts inner membrane (0.2338).

[1044] The protein was expressed in E. coli and purified as a GST-fusion product (FIG. 126A). The recombinant protein was used to immunise mice, whose sera were used in a Western blot (FIG. 126B) and for FACS analysis.

[1045] These experiments show that cp6742 is a surface-exposed and immunoaccessible protein, and that it is a useful immunogen. These properties are not evident from the sequence alone.

### Example 127

[1046] The following C. pneumoniae protein (PID 4376744) was expressed <SEQ ID 253; cp6744>:

| | |
|---|---|
| 1 | VIQHLLNFAL EETPSISVQY QEQEKLSPCD HSPEIGKKKR |
| | WNKLESFSTY |
| 51 | CSLFMSVKDH YKLNLGIQNS LSGWLLDPYR VCAPLSSPYS |
| | CPSYLLDLQN |
| 101 | KELRRSLLST FLDPKNLTSE TFRSVSINFG NSSPGQRWSE |
| | FLSRVLHDEK |
| 151 | EKHVAVVCND AKLLEEGLSP EALSLLEEDL RESGYSYLNI |
| | LSVSPEGVSK |
| 201 | VQERQILRRD LQGRSFTVMI TDLPLGSRDI RSLQLASDRX |
| | LVSSSLDAAD |
| 251 | ACASGCKVLV YENPNASWAQ ELENPYKQVE RRR* |

[1047] The cp6744 nucleotide sequence <SEQ ID 254> is:

| | |
|---|---|
| 1 | GTGATACAAC ATCTTCTAAA CTTTGCTCTA GAAGAGACCC |
| | CTTCCATTTC |
| 51 | CGTGCAATAC CAAGAACAAG AGAAGCTCTC TCCGTGCGAT |
| | CATTCCCCAG |
| 101 | AAATAGGTAA AAAGAAAAGA TGGAATAAGC TGGAATCCTT |
| | CTCCACGTAT |
| 151 | TGTTCTCTGT TTATGTCTGT TAAGGATCAT TATAAGCTGA |
| | ATCTAGGAAT |
| 201 | TCAGAATTCC CTGTCAGGGT GGCTTCTGGA TCCCTATAGG |
| | GTTTGCGCGC |
| 251 | CTTTATCTTC ACCGTACTCG TGTCCTTCCT ATCTTTTAGA |
| | TTTGCAAAAC |
| 301 | AAAGAGCTAC GTCGTTCCCT TCTGTCAACG TTTCTAGACC |
| | CTAAAAATCT |
| 351 | CACTAGCGAA ACATTCCGTT CTGTCTCTAT AAACTTTGGC |
| | AACTCTTCGT |
| 401 | TTGGACAGAG ATGGTCAGAG TTTCTATCTC GTGTTCTGCA |
| | CGACGAGAAA |
| 451 | GAAAAGCACG TAGCTGTTGT TTGTAATGAT GCAAAACTTC |
| | TGGAAGAAGG |
| 501 | ATTGTCCCCA GAGGCATTGT CTCTATTAGA AGAAGACTTA |
| | AGAGAATCAG |
| 551 | GGTATTCGTA TCTAAACATT CTCTCGGTGA GCCCCGAAGG |
| | AGTCTCCAAG |
| 601 | GTTCAGGAAC GTCAGATTCT AAGGCGAGAT CTCCAAGGAC |
| | GGTCCTTTAC |
| 651 | TGTCATGATT ACAGATCTTC CTTTAGGTAG CGAAGATATC |
| | CGTAGTTTAC |
| 701 | AATTAGCCTC GGATAGGATT TTAGTCTCCA GTTCTCTTGA |
| | TGCCGCGGAT |
| 751 | GCATGTGCTT CGGGATGTAA AGTCTTAGTC TACGAAAATC |
| | CAAATGCATC |
| 801 | CTGGGCTCAG GAATTGGAGA ACTTCTACAA ACAAGTTGAG |
| | AGAAGAAGGT |
| 851 | AG |

[1048] The PSORT algorithm predicts cytoplasm (0.3833).

[1049] The protein was expressed in E. coli and purified as a GST-fusion product (FIG. 127A). The recombinant protein was used to immunise mice, whose sera were used in a Western blot (FIG. 127B) and for FACS analysis.

[1050] These experiments show that cp6744 is a surface-exposed and immunoaccessible protein, and that it is a useful immunogen. These properties are not evident from the sequence alone.

### Example 128

[1051] The following C. pneumoniae protein (PID 4376745) was expressed <SEQ ID 255; cp6745>:

| | |
|---|---|
| 1 | VACPSISSWF TVVRQHFVNA FDFTHPVCSR ITNFALGIIK |
| | AIPVLGHIVM |
| 51 | GIEWLISWIP RHTVRHGMFT SDVSSAIKVE QTRGHNCLAP |
| | LEAYLSSLRV |
| 101 | PISQEDLGKV HGRTPEDPFV DITPTEIVQL LPDEELSTVD |
| | EALQGVRSRL |
| 151 | TYAYRSVEKP MIQDLALVCF GLRDSADLIN FVRLANGVQN |
| | HYPHTKVKLY |
| 201 | LAKNLADVWD CEISEEEKGQ LRALGLDPKI ESISLTSAGL |
| | PSVPEVATVD |
| 251 | FMITCYGKDQ EVQDP* |

[1052] The cp6745 nucleotide sequence <SEQ ID 256> is:

| | |
|---|---|
| 1 | GTGGCTTGTC CAAGTATTTC TTCTTGGTTT ACTGTCGTTC |
| | GACAGCATTT |
| 51 | TGTAAACGCC TTTGATTTCA CCCATCCCGT TTGTTCTCGG |
| | ATTACAAATT |
| 101 | TTGCTTTGGG GATCATTAAG GCAATTCCCG TATTAGGACA |
| | CATTGTCATG |
| 151 | GGAATCGAGT GGTTGATTTC CTGGATTCCC AGACACACCG |
| | TTCGTCATGG |
| 201 | AATGTTTACT TCTGATGTCT CTAGTGCTAT TAAAGTAGAA |
| | CAAACACGGG |
| 251 | GTCATAATTG TTTAGCTCCC CTAGAAGCCT ATTTAAGTAG |
| | CTTGAGAGTC |
| 301 | CCCATTTCCC AAGAAGATCT AGGCAAAGTA CACGGGAGAA |
| | CCCCAGAAGA |
| 351 | TCCCTTCGTA GATATCACAC CCACAGAAAT TGTCCAACTT |
| | CTCCCTGATG |
| 401 | AAGAACTCTC TACTGTAGAT GAGGCACTGC AAGGCGTTCG |
| | TAGTAGGTTA |
| 451 | ACCTATGCCT ATAGGTCCGT AGAGAAACCT ATGATTCAAG |
| | ATCTTGCTCT |
| 501 | TGTGGGTTTT GGTCTCCGAG ATTCTGCGGA CCTCATAAAT |
| | TTCGTGCGTC |
| 551 | TTGCTAATGG CGTGCAGAAT CACTATCCCC ATACTAAAGT |
| | GAAGCTCTAT |
| 601 | TTAGCGAAGA ACTTGGCAGA TGTCTGGGAC TGTGAAATTT |
| | CTGAAGAGGA |
| 651 | AAAAGGGCAA CTCCGAGCTC TAGGTTTAGA CCCTAAAATA |
| | GAGAGTATAT |
| 701 | CCCTTACGAG TGCAGGTCTT CCTTCAGTGC CAGAAGTCGC |
| | TACTGTCGAT |
| 751 | TTTATGATTA CCTGTTACGG GAAAGATCAG GAAGTCCAAG |
| | ATCCCTAG |

[1053] The PSORT algorithm predicts inner membrane (0.2253).

[1054] The protein was expressed in E. coli and purified as a GST-fusion product (FIG. 128A). The recombinant protein was used to immunise mice, whose sera were used in a Western blot (FIG. 128B) and for FACS analysis.

[1055] These experiments show that cp6745 is a surface-exposed and immunoaccessible protein, and that it is a useful immunogen. These properties are not evident from the sequence alone.

### Example 129

[1056] The following C. pneumoniae protein (PID 4376747) was expressed <SEQ ID 257; cp6747>:

| | |
|---|---|
| 1 | MMKQGVGQDA KELYTFLSRG NEHYQPCLWF SLEEELGFLF |
| | DEKMLCAPLS |
| 51 | EDHYCHSYLV DLVDQHLKDL ILSMFLDPQN ISAGELLKVS |
| | INVGDSFSPL |
| 101 | QQKDFLSMVL RDETGKNVVV VFKGVLSLPA TQVCKLVEEL |
| | NSKDYSYLNI |
| 151 | FSCHGDSSPQ LLFRKELEGT SGRYFTVICA LYLGDTDMRS |
| | LQLASERIMV |
| 201 | SREFDLVDAY AARCKLLKID HTNWRPGTFS RHADFADAVD |
| | VBAGPNSREF |
| 251 | KLITQANQGI LESGELPLPS KTFWEGFLAF CDRVTVTRHF |
| | IPMLDAAIKQ |
| 301 | AVWTHKHPSL IDKECEALDL RTQCLPSIVS YLEYVTNSHB |
| | KTSKGPFIQK |
| 351 | EIIADCSPLK EALFPGSDED VPSTSEDPSD DHPSDLEDS* |

[1057] The cp6747 nucleotide sequence <SEQ ID 258> is:

| | |
|---|---|
| 1 | ATGATGAAAC AAGGAGTCGG GCAGGATGCT AAAGAGCTAT |
| | ACACATTTCT |
| 51 | ATCTCGTGGG AATGAGCATT ACCAACCGTG TCTATGGTTC |
| | AGTCTCGAAG |
| 101 | AGGAACTCGG ATTCCTTTTC GATGAAAAAA TGCTCTGCGC |
| | CCCTCTATCT |
| 151 | GASGATCACT ATTGCCAGTC GTATCTTGTA GATCTAGTGG |
| | ATCAACATTT |
| 201 | AAAGGATTTA ATATTATOGA TGTTTTTAGA TCCTCAGAAT |
| | ATCTCAGCAG |
| 251 | GAGAACTCCT CAAGGTCTCT ATAAACGTTG GAGATTCTTT |
| | TTCTCCTCTA |
| 301 | CAACAGAAAG ATTTCCTCTC GATGGTCTTA CGTGATGAAA |
| | CGGGAAAAAA |
| 351 | CGTCGTCGTG GTTTTTAAAG GAGTTCTCTC CTTACCCGCA |
| | ACCCAAGTCT |
| 401 | GCAAATTAGT AGAGGAATTG AACTCTAAGG ACTACTCCTA |
| | CCTCAATATA |
| 451 | TTTTCTTGTC ACCGAGATAG TAGTCCTCAG CTTTTATTCC |
| | GTAAGGAATT |
| 501 | AGAGGGAACT TCAGGGCGTT ATTTTACAGT GATTTGCGCT |
| | TTATATCTAG |
| 551 | GGGATACAGA CATGCGTAGT TTACAACTTG CTTCTGAAAG |
| | GATCATGGTC |
| 601 | TCTAGAGAGT TTGATCTTGT AGATGCCTAT GCTGCAAGAT |
| | GCAAGCTCTT |
| 651 | GAAAATCGAT CATACAAATT GGAGACCTGG AACTTTCAGT |
| | CGCCACGCCG |
| 701 | ATTTCGCAGA TGCTGTAGAC GTATCAGCAG GATTTAACTC |
| | AAGAGAATTT |
| 751 | AAACTGATTA CGCAGGCGAA TCAAGGGATC CTAGAGTCTG |
| | GAGAACTCCC |
| 801 | GCTCCCTTCA AAAACCTTCT GGGAAGGATT CTTAGCATTC |
| | TGTGATCGAG |
| 851 | TGACTGTCAC GAGACACTTC ATTCCAATGT TAGACGCCGC |
| | TATAAAGCAA |
| 901 | GCGGTATGGA CTCATAAACA TCCCAGCTTG ATAGATAAAG |
| | AGTGTGAAGC |
| 951 | CCTAGACTTG AAAACACAGT GCTTGCCATC TATCGTATCG |
| | TACCTTGAAT |
| 1001 | ATGTCACAAA CTCTCACGAA AAAACATCGA AAGGCCCGTT |
| | CATACAAAAA |
| 1051 | GAGATTATCG CAGACTGTTC TCCTCTTAAA GAGGCGCTCT |
| | TCCCAGGTTC |
| 1101 | TGATGAAGAT GTTCCCTCTA CCTCTGAGGA TCCTTCAGAT |
| | GATCATCCTT |
| 1151 | CGGATCTTGA AGACTCTTAA |

[1058] The PSORT algorithm predicts inner membrane (0.1447).

[1059] The protein was expressed in E. coli and purified as a GST-fusion product (FIG. 129A) and also as a his-tagged product. The recombinant proteins were used to immunise mice, whose sera were used in a Western blot (FIG. 129B) and for FACS analysis.

[1060] These experiments show that cp6747 is a surface-exposed and immunoaccessible protein, and that it is a useful immunogen. These properties are not evident from the sequence alone.

### Example 130

[1061] The following C. pneumoniae protein (PID 4376756) was expressed <SEQ ID 259; cp6756>:

| | |
|---|---|
| 1 | NASGIGGSSG LGKIPPKPNG DRSRSPSPKG ELGSHEISLP |
| | PQEHGEEGAS |
| 51 | GSSHIHSSSS FLPBDQEBQS SSSAASSPGF FSRVRSGVDR |
| | ALKSFGNFFS |
| 101 | AESTSQARET RQAFVRLSRT ITADERRDVD SSSAAATEAR |
| | VAEDASVSGE |
| 151 | NPSQGVPETS SGPEPQRLFS LPSVKKQSGL GRLVQTVRDR |
| | IVLPSGAPPT |
| 201 | DSEPLSLYEL NLRLSSLRQE LSDIQSNDQL TPEEKAEATV |
| | TIQOLIQITE |
| 251 | FQCGYMEATQ SSVSLAEARF KGVETSDEIN SLCSELTDPE |
| | LQELMSDGDS |
| 301 | LQNLLDETAD DLEAALSHTR LSFSLDDNPT PIDNNPTLIS |
| | QEEPIYEEIG |
| 351 | GAADPQRTRE NWSTRLWNQI REALVSLLGM ILSILGSILH |
| | ELRIARHAAA |
| 401 | EAVGRCCTCR GEECTSSEED SNSVGSPSEI DETERTGSPH |
| | DVPRRNGSPR |
| 451 | EDSPLMNALV GWAHKHGAKT KESSESSTPE ISISAPIVRG |
| | WSQDSSVSFI |
| 501 | VNEDDHIFYD VPRRKDGIYD VPSSPRWSPA EELEEDVFGD |
| | YEVPITSAEP |
| 551 | SKDKNIYMTP RLATPAIYDL PSRPGSSGSS RSPSSDRVRS |
| | SSPNRRGVPL |
| 601 | PPVPSPAMSE EGSIYEDMSG ASGAGESDYE DMSRSPSPRG |
| | DLDEPIYANT |
| 651 | PEDNPFTQRN IDRILQERSG GASASPVEPI YDEIPWIHGR |
| | PPATLPRPEN |
| 701 | TLTNVSLRVS PGFGPEVRAA LLSESVSAVM VEAESIVPPT |
| | EPGDGESEYL |
| 751 | EPLGGLVATT KILLQKGWPR GESNA* |

[1062] The cp6756 nucleotide sequence <SEQ ID 260> is:

| | |
|---|---|
| 1 | ATGGCATCAG GAATCGGAGG ATCTAGTGGA TTAGGAAAGA |
| | TTCCACCTAA |
| 51 | AGATAATGGG GATAGAAGTC GATCGCCCTC TCCTAAGGGA |
| | GAACTTGGCA |
| 101 | GCCACGAGAT TTCCCTGCCT CCTCAAGAAC ATGGAGAGGA |
| | AGGAGCTTCA |
| 151 | GGATCTTCGC ATATACATAG CAGTTCCTCT TTTCTACCAG |
| | AAGATCAGGA |
| 201 | GTCTCAGAGC TCTTCTTCGG CAGCTTCTAG CCCGGGATTT |
| | TTTTCTCGCG |
| 251 | TACGTTCTGG GGTAGACAGG GCCTTAAAAT CATTTGGCAA |
| | CTTTTTTTCC |
| 301 | GCAGAGTCTA CGAGTCAAGC GCGTGAAACG CGACAAGCTT |
| | TTGTTAGATT |
| 351 | ATCAAAAACC ATCACCGCGG ATGAGAGACG GGATGTCGAT |
| | TCATCAAGTG |
| 401 | CTGCTGCTAC AGAAGCCCGA GTGGCAGAGG ACGCGAGTGT |
| | TTCAGGCGAA |
| 451 | AATCCTTCTC AGGGGGTTCC AGAAACCTCT TCTGGACCAG |
| | AACCTCAGCG |
| 501 | TTTATTTTCT CTTCCTTCAG TAAAAAAACA GAGCGGTTTG |
| | GGTCGGTTGG |
| 551 | TACAGACAGT TCGCGATCGC ATACTACTTC CTAGTGGGGC |
| | TCCACCTACA |
| 601 | GACAGCGAGC CTTTAAGTCT CTACGAGCTA AACCTCCGTT |
| | TGAGTAGTTT |
| 651 | ACGTCAGGAG CTCTCTGACA TACAAAGTAA TGATCAGTTG |
| | ACTCCAGAGG |
| 701 | AAAAAGCAGA AGCCACAGTT ACCATACAAC AGCTGATCCA |
| | AATTACAGAA |
| 751 | TTCCAATGCG GCTATATGGA GGCAACACAA TCTTCGGTAT |
| | CTCTAGCAGA |
| 801 | AGCTCGTTTT AAGGGGGTAG AAACTAGTGA TGAGATCAAT |
| | TCCCTCTGTT |
| 851 | CAGAACTGAC AGATCCTGAG CTTCAAGAAC TCATGAGTGA |
| | TGGAGACTCT |
| 901 | CTTCAAAACC TATTAGATGA GACTGCCGAC GATTTAGAAG |
| | CTGCTTTGTC |
| 951 | CCATACTCGA TTGAGTTTTT CTTTAGACGA TAATCCAACT |
| | CCGATAGACA |
| 1001 | ATAATCCAAC TCTGATTTCT CAAGAAGAGC CTATTTATGA |
| | GGAAATCGGA |
| 1051 | GGAGCTGCAG ATCCTCAAAG AACTCGGGAA AACTGGTCTA |
| | CAAGATTATG |
| 1101 | GAATCAGATT CGCGAGGCTC TGGTTTCTCT TTTAGGAATG |
| | ATTTTAAGCA |
| 1151 | TTCTAGGGTC CATCTTGCAC AGGTTGCGTA TTGCTCGTCA |
| | TCCAGCTCCT |
| 1201 | GAAGCAGTGG GTCGTTGTTG CACGTGCCGA GGAGAAGAGT |
| | GTACTTCTTC |
| 1251 | TGAAGAGGAC TCGATGTCGG TGGGGTCTCC TTCAGAAATT |
| | GATGAAACTG |
| 1301 | AAAGAACGGG CTCTCCGCAT GACGTTCCAC GCAGAAATGG |
| | AAGTCCACGT |
| 1351 | GAAGATTCTC CATTGATGAA TGCCTTAGTA GGATGGGCAC |
| | ATAAGCACGG |
| 1401 | TGCTAAAACC AAGGAGAGTT CAGAATCAAG TACCCCGGAA |
| | ATTTCGATTT |
| 1451 | CTGCTCCCAT AGTCAGAGGT TGGAGTCAAG ACAGTTCCGT |
| | CAGTTTTATT |
| 1501 | GTTATGGAAG ATGATCATAT TTTCTATGAT GTTCCTCGTA |
| | GAAAAGATGG |
| 1551 | AATCTATGAC GTTCCTAGTT CCCCTAGATG GAGTCCTGCG |
| | CGAGAGTTGG |
| 1601 | AAGAGGATGT TTTTGGAGAT TATGAAGTTC CTATAACCTC |
| | TGCTGAACCA |
| 1651 | TCTAAAGACA AGAACATCTA CATGACACCT AGATTAGCAA |
| | CTCCTGCTAT |
| 1701 | CTATGATCTT CCTTCACGTC CAGGATCGTC TGGAAGCTCA |
| | CGTTCTCCGT |
| 1751 | CTTCAGATCG CGTACGAAGC AGCTCACCAA ATAGACGGGG |
| | TGTGCCTCTT |
| 1801 | CCTCCAGTTC CTTCACCTGC TATGAGTGAG GAGGGGAGCA |
| | TTTATGAGGA |
| 1851 | TATGAGCGGT GCTTCAGGTG CAGGTGAAAG TGATTATGAA |
| | GATATGAGCC |
| 1901 | GTTCCCCCTC TCCTAGAGGC GACTTGGATG AACCCATATA |
| | TGCTAATACT |
| 1951 | CCTGAAGATA ATCCATTTAC TCAGAGAAAT ATAGATAGAA |
| | TTTTACAGGA |
| 2001 | GAGGTCAGGC GGTGCTTCCG CTTCTCCTGT AGAGCCTATT |
| | TATGATGAGA |
| 2051 | TCCCATGGAT TCATGGCAGG CCCCCTGCTA CACTTCCAAG |
| | ACCCGAGAAT |
| 2101 | ACATTGACTA ATGTTTCGCT TAGAGTGAGC CCAGGGTTTG |
| | GACCAGAAGT |
| 2151 | AAGAGCCGCT TTGCTTAGCG AGAGCGTGAG TGCTGTTATG |
| | GTCGAAGCAG |
| 2201 | AGAGTATTGT TCCTCCAACA GAGCCGGGGG ACGGAGAATC |
| | AGAATATCTA |
| 2251 | GAGCCCTTAG GGGGACTTGT AGCTACAACG AAAATCTTAC |
| | TACAAAAAGG |
| 2301 | ATCCCCTCCT GGAGAGTCGA ATGCTTAG |

[1063] The PSORT algorithm predicts inner membrane (0.3994).

[1064] The protein was expressed in E. coli and purified as a GST-fusion product (FIG. 130A). The recombinant protein was used to immunise mice, whose sera were used in a Western blot (FIG. 130B) and for FACS analysis.

[1065] These experiments show that cp6756 is a surface-exposed and immunoaccessible protein, and that it is a useful immunogen. These properties are not evident from the sequence alone.

### Example 131

[1066] The following C. pneumoniae protein (PID 4376761) was expressed <SEQ ID 261; cp6761>:

| | |
|---|---|
| 1 | MTVAEVKGTF KLVCLGCRVN QYEVQAYRDQ LTILGYQEVL |
| | DESEIPADLCI |
| 51 | INTCAVTASA ESSGRHAVRQ LCRQNPTAHI VVTGCLGESD |
| | KEFFASLDRQ |
| 101 | CTLVSNKEKS RLIEKIFSYD TTEPEFKIHS FEGKSRAFIK |
| | VQDGCNSFCS |
| 151 | YCIIPYLRGR SVSRPAEKIL AEIAGVVDQG YREVVIAGIN |
| | VGDYCDGERS |
| 201 | LASLIEQVDR IPGIERIRIS SIDPDDITED LHPAITSSRH |
| | TCPSSHLVLQ |
| 251 | SGSNSILKRM NRKYSRGDFL DCVEKFRASD PRYAFTTDVI |
| | VGFPGESDQD |
| 301 | FEDTLRIIED VGFIKVHSFP FSARRRTKAY TFDNQIPNQV |
| | IYERKKYLAE |
| 351 | VAKRVGQKEM MKRLGETTEV LVEKVTGQVA TGHSPYFEKV |
| | SFPVVGTVAI |
| 401 | NTLVSVRLDR VEEEGLIGEI V* |

[1067] The cp6761 nucleotide sequence <SEQ ID 262> is:

| | |
|---|---|
| 1 | ATGACGGTTG CGGAAGTCAA AGGAACATTT AAGCTGGTCT |
| | GTTTAGGCTG |
| 51 | TCGGGTGAAT CAGTATGAGG TCCAAGCATA TCGCGACCAG |
| | TTGACTATCT |
| 101 | TAGGTTACCA AGAGGTCCTG GATTCTGAAA TCCCTGCAGA |
| | TTTATGCATA |
| 151 | ATCAATACGT GTGCTGTCAC AGCTTCTGCT GAGAGTTCGG |
| | GTCGTCATGC |
| 201 | TGTGCGTCAG TTATGTCGTC AGAACCCTAC AGCACATATT |
| | GTTGTCACAG |
| 251 | GTTGTTTGGG GGAATCTGAC AAAGAGTTTT TTGCTTCTTT |
| | GGATCGGCAA |
| 301 | TGCACACTTG TTTCCAATAA AGAAAAATCC CGACTAATAG |
| | AAAAAATTTT |
| 351 | TTCCTATGAT ACGACCTTCC CTGAGTTCAA GATCCATAGT |
| | TTTGAGGGAA |
| 401 | AGTCTCGAGC TTTTATTAAA GTTCAAGATG GCTGTAATTC |
| | TTTTTGCTCG |
| 451 | TACTGCATTA TTCCTTATTT GCGGGGGCGT GCGGTTTCTC |
| | GTCCTGCTGA |
| 501 | GAAGATTTTA GCTGAAATCG CAGGGGTTGT AGACCAAGGA |
| | TATCGCGAAG |
| 551 | TTGTAATTGC AGGAATTAAT GTTGGAGATT ATTGCGATGG |
| | AGAGCGTTCA |
| 601 | TTAGCCTCTT TGATTGAACA GGTGGACCGG ATTCCTGGAA |
| | TTGAGAGGAT |
| 651 | TCGAATTTCC TCTATAGATC CTGATGATAT CACTGAAGAT |
| | CTGCACCGTG |
| 701 | CCATCACCTC ATCGCGTCAC ACTTGTCCTT CGTCACACCT |
| | TGTTCTTCAA |
| 751 | TCGGGGTCGA ATTCAATTTT AAAGAGAATG AACCGGAAGT |
| | ATTCTCGCGG |
| 801 | AGATTTTTTA GATTGTGTAG AGAAGTTCCG TGCTTCTGAT |
| | CCTCGCTATG |
| 851 | CCTTTACTAC AGATGTCATT GTCGGATTTC CTGGAGAGAG |
| | TGATCAAGAT |
| 901 | TTTGAAGATA CTTTGAGAAT TATTGAAGAT GTAGGCTTTA |
| | TTAAAGTGCA |
| 951 | TAGTTTCCCT TTCAGTGCTC GTCGTCGTAC TAAGGCATAT |
| | ACTTTTGATA |
| 1001 | ATCAGATTCC CAATCAGGTG ATCTATGAGA GGAAGAAGTA |
| | TCTTCCTGAG |
| 1051 | GTTGCTAAGA GGGTAGGCCA GAAAGAGATG ATGAAGCGTT |
| | TAGGAGAGAC |
| 1101 | TACAGAGGTG CTTGTTGAGA AAGTAACGGG GCAGGTTGCT |
| | ACGGGTCACT |
| 1151 | CTCCTTATTT TGAAAAGGTT TCTTTCCCTG TTGTAGGAAC |
| | GGTAGCTATC |
| 1201 | AACACTCTAG TTTCTGTGCG TCTTGATAGG GTAGAGGAAG |
| | AAGGGCTGAT |
| 1251 | TGGCGAGATT GTATGA |

[1068] The PSORT algorithm predicts inner membrane (0.1574).

[1069] The protein was expressed in E. coli and purified as a GST-fusion product (FIG. 131A) and also as a his-tagged product. The recombinant proteins were used to immunise mice, whose sera were used in a Western blot (FIG. 131B) and for FACS analysis.

[1070] These experiments show that cp6761 is a surface-exposed and immunoaccessible protein, and that it is a useful immunogen. These properties are not evident from the sequence alone.

### Example 132

[1071] The following C. pneumoniae protein (PID 4376766) was expressed <SEQ ID 263; cp6766>:

| | |
|---|---|
| 1 | MATSVPVTSS TSVGEANSSN ERFTERTSRM YYAALVLGAL |
| | SCLIFIAMIV |
| 51 | IFPQVGLWAV VLGFALGCLL LSLAIVPAVS GLVLGKTLEP |
| | SREATPPEIV |
| 101 | AQKEWTTQQD VLGNEYWRSE LISLFKRGDL HESLIVDSKD |
| | RSLDIDOSLO |
| 151 | NILKLEPLST TLSLLKKDCV HINIILHLVR QWNLLGVDLS |
| | PEVTAEAEEL |
| 201 | LLFLIEEQYY SPDILKLIRY GDALQATSPL MDWADSGSFS |
| | VDADGVFSCR |
| 251 | REECSPEDAL AQFDLLLALE NPDRRFLKDS FLTYIWSSSF |
| | FEKFLHRHLE |
| 301 | SLQRKLPETA IDVARYEAQI QTFLSRYFQK LDLINAMSLD |
| | WGYNCAEGEK |
| 351 | CYESANQRLD NLFIAFSSSV PAMKRLFDKY GSVVRVDRRQ |
| | IREQILSNTE |
| 401 | ILENESGPLC SLYEYPLSYL IDWAVLLDCV RGTEISLEDQ |
| | ADYTVCLQGL |
| 451 | DSMLSQFASR LQSGQKVLNP RDVLSEQAAV MLVHGLAAQG |
| | VSFQGLKALM |
| 501 | YLTAVPQRMW LGALPLFESF PVFNRMKEFL GESLGD* |

[1072] The cp6766 nucleotide sequence <SEQ ID 264> is:

| | |
|---|---|
| 1 | ATGGCAACCT CTGTTCCTGT AACTTCATCT ACTTCTGTAG |
| | GAGAGGCTAA |
| 51 | CTCCTCCAAC GAAAGATTTA CTGAACGAAC ATCGCGAATG |
| | TATTACGCAG |
| 101 | CTTTAGTCCT AGGGGCTTTG AGCTGTTTAA TTTTTATTGC |
| | TATGATTGTC |
| 151 | ATTTTCCCAC AGGTCGGATT GTGGGCTGTG GTCCTCGGGT |
| | TTGCTCTTGG |
| 201 | ATGTTTACTT TTAAGCTTAG CTATCGTTTT TGCTGTCTCC |
| | GGTCTCGTTT |
| 251 | TAGGCAAGAC TTTAGAACCT AGTCGAGAAG CGACTCCTCC |
| | AGAAATTGTT |
| 301 | GCGCAAAAGG AGTGGACTAC ACAACAAGAT GTCTTAGGGA |
| | ATGAGTATTG |
| 351 | GCGTTCCGAG TTGATTTCCT TGTTCTTACG AGGGGATCTC |
| | CACGAATCTC |
| 401 | TGATTGTTGA TTCTAAGGAT CGATCTTTAG ATATTGATCA |
| | GAGTTTACAA |
| 451 | AATATATTGA AACTTGAGCC CCTATCTACG ACACTTTCGC |
| | TGTTAAAGAA |
| 501 | AGATTGTGTC CACATCAATA TCATTTTACA TTTAGTGAGA |
| | CAGTGGAACT |
| 551 | TACTGGGAGT GGATCTTAGT CCTGAAGTCA CTGCGCACGC |
| | CGAGGAACTT |
| 601 | CTACTCTTTT TGATAGAAGA GCAGTATTAC TCTCCTGATA |
| | TTTTGAAATT |
| 651 | GATTCGCTAC GGAGATGCTT TACAAGCAAC GTCTCCTTTG |
| | ATGGATTGGG |
| 701 | CAGATTCAGG TTCCTTTAGT GTAGACGCAG ACGGGGTATT |
| | TAGCTGTCGC |
| 751 | AGAGAAGAAT GTTCTCCTGA GGATGCTTTG GCGCAATTCG |
| | ATCTTCTTTT |
| 801 | GGCGTTGGAA AATCCCGACA GACGCTTCTT AAAGGATTCT |
| | TTTCTTACCT |
| 851 | ACATTTGGTC GTCTTCATTT TTTGAGAAGT TTTTACATCG |
| | CCATCTAGAG |
| 901 | AGCTTGCAAA GAAAGCTCCC AGAGACAGCG ATCGATGTCG |
| | CCCGCTATGA |
| 951 | AGCACAAATA CAAACATTTC TCTCTCGCTA TTTTCAGAAG |
| | CTCGATTTGA |
| 1001 | TAAACGCAAT GTCCTTAGAT TGGGGATATA ACTGTGCTGA |
| | GGGAGAAAAA |
| 1051 | TGTTATGAGA GCGCAAATCA AAGATTAGAC AACCTATTTA |
| | TTGCTTTTTC |
| 1101 | TTCTTCTGTT CCTGCTATGA AGCGGCTCTT TGACAAATAT |
| | GGTTCTGTGG |
| 1151 | TACGGGTAGA TCGTAGGCAG ATTCGTGAGC AGATTCTTTC |
| | GAACACTGAA |
| 1201 | ATCTTAGAAA ATGAGTCAGG GTTCCTCTGC AGTTTGTATG |
| | AATATCCTTT |
| 1251 | ATCCTATTTG ATAGATTGGG CTGTTTTGCT AGACTGTGTT |
| | CGCGGTACCG |
| 1301 | AAATCTCTCT AGAAGATCAG GCCGATTACA CCGTTTGTTT |
| | GCAAGGCTTG |
| 1351 | GATTCTATGT TATCTCAATT TGCGAGTCGT TTACAGTCTG |
| | GACAAAAAGT |
| 1401 | ATTGAATCCT AGAGATGTTT TAAGTGAACA GGCTGCGGTT |
| | ATGCTTGTTC |
| 1451 | ATGGCTTGGC AGCACAGGGC GTGTCGTTTC AAGGATTGAA |
| | AGCTTTGATG |
| 1501 | TATTTGACAG CCGTTCCCCA AAGAATGTGG TTAGGAGCAT |
| | TGCCTTTATT |
| 1551 | TGAATCTTTT CCTGTCTTTA ATCGGATGAA AGAATTTCTT |
| | GGGGAATCTC |
| 1601 | TGGGAGACTA G |

[1073] The PSORT algorithm predicts inner membrane (0.6158).

[1074] The protein was expressed in E. coli and purified as a GST-fusion product (FIG. 132A) and also as a his-tagged product. The recombinant proteins were used to immunise mice, whose sera were used in a Western blot (FIG. 132B) and for FACS analysis.

[1075] These experiments show that cp6766 is a surface-exposed and immunoaccessible protein, and that it is a useful immunogen. These properties are not evident from the sequence alone.

### Example 133

[1076] The following C. pneumoniae protein (PID 4376804) was expressed <SEQ ID 265; cp6804>:

| | |
|---|---|
| 1 | MSNQLQPCIS LGCVSYINSF PLSLQLIKRN DIRCVLAPPA |
| | DLLNLLIEGK |
| 51 | LDVALTSSLG AISHNLGYVP GFGIAANQRI LSVNLYAAPT |
| | FFNSPQPRIA |
| 101 | ATLESRSSIG LLKVLCRHLW TIPTPHILRF ITTKVLRQTP |
| | ENYDGLLLIG |
| 151 | DAALQHPVLP GFVTYDLASG WYDLTKLPFV FALLLHSTSW |
| | KEHPLPNLAM |
| 201 | EEALQQFESS PEEVLKEAHQ HTGLPPSLLQ EYYALCQYRL |
| | GEEHYESFER |
| 251 | FREYYGTLYQ QARL |

[1077] The cp6804 nucleotide sequence <SEQ ID 266> is:

| | |
|---|---|
| 1 | ATGTCTAACC AACTCCAGCC ATGTATAAGC TThGGCTGCG |
| | TAAGTTATAT |
| 51 | TAATTCCTTT CCGCTGTCCC TACAACTCAT AAAAAGAAAC |
| | GATATTCGCT |
| 101 | GTGTTCTTGC TCCCCCTGCA GACCTCCTCA ACTTGCTAAT |
| | CGAAGGGAAA |
| 151 | CTCGATGTTG CTTTGACCTC ATCCCTAGGA GCTATCTCTC |
| | ATAACTTGGG |
| 201 | GTATGTCCCC GGCTTTGGAA TTGCAGCAAA CCAACGTATC |
| | CTCAGTGTAA |
| 251 | ACCTCTATGC AGCTCCCACT TTCTTTAACT CACCGCAACC |
| | TCGGATTGCC |
| 301 | GCAACTTTAG AAAGTCGCTC CTCTATAGGA CTCTTAAAAC |
| | TGCTTTGTCG |
| 351 | TCATCTCTGG CGCATCCCAA CTCCTCATAT CCTAAGATTC |
| | ATAACTACAA |
| 401 | AAGTACTCAG ACAAACCCCT GAAAATTATG ATGGCCTCCT |
| | CCTAATCGGA |
| 451 | GATGCAGCGC TACAACATCC TGTACTTCCT GGATTTGTAA |
| | CCTATGACCT |
| 501 | TGCCTCGGGG TGGTATGATC TTACAAAGCT ACCTTTTGTA |
| | TTTGCTCTTC |
| 551 | TTCTACACAG CACCTCTTGG AAAGAACATC CCCTACCCAA |
| | CCTTGCGATG |
| 601 | GAAGAAGCCC TCCAACAGTT CGAATCTTCA CCCGAAGAAG |
| | TCCTTAAAGA |
| 651 | AGCTCATCAA CATACAGGTC TGCCCCCTTC TCTTCTTCAA |
| | GAATACTATG |
| 701 | CCCTATGCCA GTACCGTCTA GGAGAAGAAC ACTACGAAAG |
| | CTTTGAAAAA |
| 751 | TTCCGGGAAT ATTATGGAAC CCTCTACCAA CAAGCCCGAC |
| | TGTAA |

[1078] The PSORT algorithm predicts inner membrane (0.060).

[1079] The protein was expressed in E. coli and purified as a GST-fusion product (FIG. 133A). The recombinant protein was used to immunise mice, whose sera were used in a Western blot (FIG. 133B) and for FACS analysis.

[1080] These experiments show that cp6804 is a surface-exposed and immunoaccessible protein, and that it is a useful immunogen. These properties are not evident from the sequence alone.

### Example 134

[1081] The following C. pneumoniae protein (PID 4376805) was expressed <SEQ ID 267; cp6805>:

| | |
|---|---|
| 1 | MSSLLSCGRI RPTRVTCSLK TYLEDTSQNQ LSTRLVRASV |
| | IFLCALLIIL |
| 51 | VCVALSSLIP SIMALATSFT VMGLILFVMS LLGDVAIISY |
| | LTYSTVTSYR |
| 101 | QNKRAFEIHK PARSVYYEGV RHWDLGRSSL GTGEIPIVRT |
| | LFSPFQNHGL |
| 151 | NHALAAKIFL FMEHFSPEPP NEPLVDWACL IRDFRPHVSS |
| | LCFVIEKQGS |
| 201 | SLRTKEGNTI CEAFRSDYDA HFAMVDCYRL IHSKLIIEKM |
| | GLKNIDIIPS |
| 251 | VHVRBPYPSR POEGYREOLL RMYGGKGAL* |

[1082] The cp6805 nucleotide sequence <SEQ ID 268> is:

| | |
|---|---|
| 1 | ATGTCATCAC TACTGAGCTG CGGAAGAATA GAQCCGACTC |
| | GGGTTACCTG |
| 51 | TAGCTTAAAG ACGTATCTTG AGGATACGAG TCAGAATCAG |
| | TTGAGCACAC |
| 101 | GTCTAGTTCG GGCAAGTGTC ATCTTTTTAT GCGCATTGTT |
| | GATCATTTTG |
| 151 | GTTTGTGTGG CCCTCTCTAG TTTGATTCCA AGCATTATGG |
| | CCTTGGCGAC |
| 201 | CTCTTTTACG GTAATGGGGT TAATTCTTTT TGTGATGTCA |
| | CTTCTTGCTG |
| 251 | ACGTTGCAAT TATAAGTTAT CTTACTTATA GCACTGTTAC |
| | GAGTTACCGG |
| 301 | CAAAATAAGA GAGCTTTTGA GATTCACAAG CCCGCTCGCT |
| | CCGTTTACTA |
| 351 | CGAGGGGGTC CGCCATTGGG ATTTAGGACG ATCATCTTTA |
| | GGCACAGGCG |
| 401 | AGATTCCTAT AGTAAGGACG TTATTCTCTC CATTTCAGAA |
| | CCATGGTCTT |
| 451 | AACCATGCCT TAGCTGCTAA AATTTTCCTA TTTATGGAGC |
| | ATTTCAGCCC |
| 501 | TGAGCCACCG AACGAGCCTT TGGTGGATTG GGCCTGTTTG |
| | ATTCGGGATT |
| 551 | TTAGGCCTCA CGTCAGTTCT TTGTGCTTTG TTATTGAAAA |
| | ACAAGGGTCA |
| 601 | TCGCTGAGGA CTAAGGAAGG CAATACGATT TGTGAGGCTT |
| | TCCGCTCTGA |
| 651 | TTACGACGCC CATTTTGCTA TGGTAGATTG CTACCGGTTG |
| | ATCCACTCTA |
| 701 | AGTTGATTAT AGAGAAAATG GGATTGAAGA ATATCGATAT |
| | CATTCCGAGT |
| 751 | GTCATGGTTC GTGAAGATTA TCCTAGCCGT CCTGGGGAGG |
| | GCTATCGCGA |
| 801 | AGGCCTATTA CGTATGTATG GTGGCAAGGG GGCTCTGTGA |

[1083] The PSORT algorithm predicts inner membrane (0.711).

[1084] The protein was expressed in E. coli and purified as a GST-fusion product FIG. 134A). The recombinant protein was used to immunise mice, whose sera were used in a Western blot (FIG. 134B) and for FACS analysis.

[1085] These experiments show that cp6805 is a surface-exposed and immunoaccessible protein, and that it is a useful immunogen. These properties are not evident from the sequence alone.

### Example 135

[1086] The following C. pneumoniae protein (PID 4376813) was expressed <SEQ ID 269; cp6813>:

| | |
|---|---|
| 1 | MSGPSRTBSS QVSVLSYVPR DKEIAPKKQF TIAKISTLAI |
| | LASLALGALV |
| 51 | AGISLTIVLG NPVFLALLIT TALFSVVTFL VYHQMTSKVS |
| | SNWQKVLEQN |
| 101 | FKPLGKAWQE KNVDCYSNEM QFYNNHLNPK FKVAIQTDAS |
| | QPFQPTFLTG |
| 151 | LRVIEKNQST GIIFNPVGPT NLIDNTATNL STILYSTLKD |
| | KSVWDTCKQR |
| 201 | EGGPAKGEDP FSPTEVRVVK LPNEALDQTF NLNLSSAEKK |
| | SILPTFLGHV |
| 251 | CGPKSEELPN QQEYYRQALL AYENCLKAAI ESHAAIVALP |
| | LFTSVYEVPP |
| 301 | EEILPKEGTF YWDNQTQAFC KRALLDAIQN TALRYPQRSL |
| | LVILQDPFNT |
| 351 | IESQSRSEE* |

[1087] The cp6813 nucleotide sequence <SEQ ID 270> is:

| | |
|---|---|
| 1 | ATGTCAGGAC CCTCACGTAC TGAGAGCTCT CAAGTTTCTG |
| | TACTATCCTA |
| 51 | TGTGCCTCGG GATAAAGAAA TTGCTCCTAA AAAACAGTTT |
| | ACCATAGCAA |
| 101 | AAATATCCAC TCTTGCAATC CTAGCTTCTT TAGCTTTAGG |
| | AGCTTTGGTG |
| 151 | GCTGGAATCT CTTTAACGAT AGTATTAGGG AACCCTGTAT |
| | TTTTGGCTCT |
| 201 | TCTCATTACC ACGGCCCTCT TCTCAGTTGT AACCTTCTTA |
| | GTCTACCACC |
| 251 | AAATGACCTC AAAGGTATCT TCTAACTGGC AGAAAGTTCT |
| | AGAGCAAAAC |
| 301 | TTCAAGCCTT TGGGAAAAGC GTGGCAAGAA AAAAACGTAG |
| | ACTGCTACTC |
| 351 | AAACGAGATG CAATTTTACA ATAATCACCT GAACCCTAAG |
| | TTCAAGGTAG |
| 401 | CGATACAAAC AGATGCGTCT CAACCATTTC AGCCTACTTT |
| | CTTAACTGGA |
| 451 | CTTAGAGTGA TCGAAAAAAA TCAATCCACA GGGATCATCT |
| | TTAATCCCGT |
| 501 | AGGCCCAACG AATCTGATCG ACAACACTGC AACGAACCTC |
| | TCTACTATCC |
| 551 | TTTACTCCAC CCTAAAAGAT AAAAGCGTGT GGGATACATG |
| | CAAGCAACGC |
| 601 | GAAGGGGGTC CCGCAAAAGG AGAAGACCCC TTTTCCCCTA |
| | CCGAAGTGAG |
| 651 | AGTAGTAAAA CTTCCAAACG AAGCTCTAGA TCAAACGTTT |
| | AATCTAAATT |
| 701 | TAATCTCTGC AGAAAAGAAA AGTATTCTTC CGACCTTTTT |
| | AGGCCACGTA |
| 751 | TGCOGCCCTA AATCTGAAGA GTTACCAAAT CAGCAAGAAT |
| | ATTATCGCCA |
| 801 | AGCTTTACTA GCGTACGAGA ACTGCCTTAA AGCAGCTATA |
| | GAAAGTCATG |
| 851 | CAGCAATCGT TGCTCTTCCT CTCTTTACTT CGGTCTATGA |
| | AGTGCCTCCA |
| 901 | GAAGAGATTC TTCCTAAAGA AGGCACTTTC TATTGGGACA |
| | ACCAAACTCA |
| 951 | AGCGTTTTGC AAACCCGCTT TATTGGACGC TATTCAAAAT |
| | ACGGCCCTAC |
| 1001 | GCTATCCTCA AAGATCTTTA CTTGTTATAC TCCAAGATCC |
| | TTTTAATACT |
| 1051 | ATAGAATCAC AAAGTCGTTC TGAGGAGTAA |

[1088] The PSORT algorithm predicts inner membrane (0.4291).

[1089] The protein was expressed in E. coli and purified as a GST-fusion product (FIG. 135A). The recombinant protein was used to immunise mice, whose sera were used in a Western blot (FIG. 135B) and for FACS analysis.

[1090] These experiments show that cp6813 is a surface-exposed and immunoaccessible protein, and that it is a useful immunogen. These properties are not evident from the sequence alone.

### Example 136

[1091] The following C. pneumoniae protein (PID 4376844) was expressed <SEQ ID 271; cp6844>:

| | |
|---|---|
| 1 | MWRVVLRFLI IFILGEAVFP LRASESFSWE TSTCLTVLGI |
| | PFIDIILTTN |
| 51 | EDFVAQCGLQ IGTISSTNNA KIKEIFLIYK EKFPEASISF |
| | KRKEPLNLSQ |
| 101 | SHLSDLGILC MRNGETYAEG MANKENGPAL KQPKDLRLVL |
| | RCPNQPDTLL |
| 151 | YSEKEAEKGI ETNTCLCNQG YTLLDGQLIL YGDSIEKFLK |
| | ETKRRNNHTL |
| 201 | VDLCDSQVVT TFLGFFWSLL NYVQVLFLSE DSAKILAGIP |
| | DLAQATQLLS |
| 251 | HTVPLLFIYT NDSIHIIEQG KESSFTYNQD LTEPILGFLF |
| | GYINRGSMEY |
| 301 | CFNCAQSSLG ET* |

[1092] The cp6844 nucleotide sequence <SEQ ID 272> is:

| | |
|---|---|
| 1 | ATGTGGCGCG TTGTCCTCAG ATTCCTTATh ATTTTTATCT |
| | TGGGAAGAGC |
| 51 | CGTCTTCCCT CTAAGAGCTT CAGAAAGCTT CPCCTGGGAA |
| | ACATCGACCT |
| 101 | GTTTAACAGT GCTAGGGATT CCTTTCATAG ATATTATCCT |
| | CACAACGAAT |
| 151 | GAGGACTTTG TTGCCCAGTG CGGCCTGCAA ATAGGAACCA |
| | TTTCTTCGAC |
| 201 | TAATAACGCA AAAATAAAAG AAATTTTTTT GATATATAAG |
| | GAAAAATTTC |
| 251 | CAGAAGCCTC TATCAGTTTC AAACGAAAAG AACCTCTAAA |
| | CCTTTCCCAA |
| 301 | TCCCATCTCT CGGATTTAGG TATTTTATGT ATGCGTAACG |
| | GAGAAACTTA |
| 351 | CGCTGAGGGA ATGGCAAATA AAGAAAACGG ACCCGCTCTA |
| | AAACAACCCA |
| 401 | AGGATCTAAG ATTAGTTTTA CGTTGTCCTA ACCAACCAGA |
| | TACCCTGCTC |
| 451 | TACTCGGAAA AAGAAGCAGA AAAGGGCATA GAAACAAATA |
| | CTTGCCTATG |
| 501 | CAATCAGGGA TACACACPCC TGGATGGGCA ATTGATTCTC |
| | TACGGGGATA |
| 551 | GTATAGAAAA GTTTCTGAAA GAGACCAAAA GAAAGAATAA |
| | CCACACGCTT |
| 601 | GTTGATCTTT GTGACTCACA AGTCGTGACC ACGTTCCTCG |
| | GTCGCTTTTG |
| 651 | GTCTCTTCTA AACTACGTTC AAGTTCTTTT CCTATCTGAA |
| | GACTCCGCTA |
| 701 | AAATTCTTGC GGGCATCCCA GACCTAGCTC AAGCTACGCA |
| | ATTGCTTTCC |
| 751 | CACACCGTAC CTTTGCTTTT TATTTATACC AACGATTCTA |
| | TTCACATCAT |
| 801 | AGAACAAGGC AAAGAAAGTA GTTTTACCTA TAACCAAGAT |
| | TTAACAGAGC |
| 851 | CCATTTTAGG ATTTCTCTTT GGTTACATAA ATCGCGGCTC |
| | TATGGAATAC |
| 901 | TGCTTTAATT GTGCACAGTC TTCATTAGGA GAAACCTAA |

[1093] The PSORT algorithm predicts inner membrane (0.1786).

[1094] The protein was expressed in E. coli and purified as a GST-fusion product (FIG. 136A) and also in his-tagged form. The recombinant proteins were used to immunise mice, whose sera were used in a Western blot (FIG. 136B) and for FACS analysis.

[1095] These experiments show that cp6844 is a surface-exposed and immunoaccessible protein, and that it is a useful immunogen. These properties are not evident from the sequence alone.

### Example 137

[1096] The following C. pneumoniae protein (PID 4377201) was expressed <SEQ ID 273; cp7201>:

| | |
|---|---|
| 1 | VLVGICPSLY PEHPRSFYYR VSGDIGSRPD DRGFVNSGVE |
| | TLPYSSGSFG |
| 51 | IFWISFTDPT FNFAIVNTFM RTAGINEVSR PMTQDTETSL |
| | IEMRDLSEQQ |
| 101 | EANNTDSLEQ EESLMGIVGH TVGGVSMTVT SSPNIFYRIQ |
| | TLLGLPETLA |
| 151 | EAEENPTFPN STIDSLAEIM MNLVRISDAV SIFWIFPIVD |
| | TTYNGVLLAV |
| 201 | CIGFFGINGI CSTFLMLTNP RSRRDRWRNL RIMVLCYRSL |
| | GSGMNLFDLS |
| 251 | NNVRMAARRH VTSCTVALYA NVTLFGWTVA IQDALQYGPP |
| | SVRDAPYRYC |
| 301 | LRHRYCLTQR NEDSLQTTGT RFQVTRTHLE DQQMVASILN |
| | LSVFGLFFGF |
| 351 | VGLMTTFGGL EISPSCRWDA ANNRTVGIF* |

[1097] The cp7201 nucleotide sequence <SEQ ID 274> is:

| | |
|---|---|
| 1 | GTGCTCGTTG GTATCTGTCC TTCTCTATAT CCAGAACATC |
| | CTCGCTCCTT |
| 51 | TTATTATCGT GTTTCTGGAG ATATAGGCTC CCGATTCGAC |
| | GATAGAGGAT |
| 101 | TTGTAAACTC TGGAGTCGAA ACCCTGCCAT ACTCTTCAGG |
| | CAGCTTTGGG |
| 151 | ATTTTTTGGA TCTCGTTTAC GGATOCCACA TTTAATTTTG |
| | CTATCGTAAA |
| 201 | TACCTTTATG CGAACTGCAG GGATCAATGA AGTCTCTAGA |
| | CCCATGACAC |
| 251 | AAGATACAGA AACTTCATTG ATAGAAATGA GAGACCTAAG |
| | TGAACAACAA |
| 301 | GAAGCGAATA ACACAGATTC TTTAGAGCAA GAAGAGAGCT |
| | TAATGGGTAT |
| 351 | TGTAGGACAT ACTGTGGGAG GAGTTTCCAT GACCGTGACC |
| | TCCAGTCCAA |
| 401 | ATATCTTTTA TCGTATACAA ACACTTCTGG GACTGCCAGA |
| | GACTCTTGCA |
| 451 | GAAGCTGAAG AAAATCCTAC CTTCCCAAAT TCTACTATAG |
| | ATAGCCTTGC |
| 501 | AGAAATAATG ATGAACCTCG TAAGGATCTC TGATGCTGTC |
| | TCTATTTTCT |
| 551 | GGATTTTTCC TATCGTAGAT ACTACATATA ATGGAGTTTT |
| | ATTAGCCGTC |
| 601 | TGTATCGGCT TCTTCGGAAT CAATGGGATT TGTTCCACGT |
| | TCCTTATGCT |
| 651 | TACGAATCCA CGCTCTCGTC GAGATAGATG GAGGAATTTA |
| | CGCATCATGG |
| 701 | TTCTTTGCTA TCGTTCTTTG GGAAGCGGAA TGAATCTCTT |
| | TGATCTTAGC |
| 751 | AATAATGTGC GCATGGCAGC ACGTAGGCAT GTGACATCAT |
| | GTACAGTAGC |
| 801 | TCTCTATGCT ATGGTCACTC TATTTGGATG GACAGTAGCA |
| | ATACAAGATG |
| 851 | CTTTGCAATA TGGTTTCCCT AGCGTTCGGG ATGCCTTCTA |
| | TAGATATTGC |
| 901 | TTACGCCACA GATATTGCTT AACTCAAAGA AACGAAGACT |
| | CTCTGCAAAC |
| 951 | TACAGGAACG CGCTTTCAGG TTACCCGTAC ACATCTAGAA |
| | GATCAACTGA |
| 1001 | TGGTGGCTTC TATTTTGAAT TTGAGTGTTT TTGGGCTCTT |
| | TTTTGGATTC |
| 1051 | GTAGGGCTAA TGACCACGTT TGGAGGATTA GAAATCTCAC |
| | CATCTTGTCG |
| 1101 | GTGGGATGCA GCAAATAACC GAACGGTAGG TATTTTTTAG |

[1098] The PSORT algorithm predicts inner membrane (0.3102).

[1099] The protein was expressed in E. coli and purified as a GST-fusion product (FIG. 137A). The recombinant protein was used to immunise mice, whose sera were used in a Western blot (FIG. 137B) and for FACS analysis.

[1100] These experiments show that cp7201 is a surface-exposed and immunoaccessible protein, and that it is a useful immunogen. These properties are not evident from the sequence alone.

### Example 138

[1101] The following C. pneumoniae protein (PID 4377251) was expressed <SEQ ID 275; cp7251>:

| | |
|---|---|
| 1 | MAPIHGSNAF VEDIIMSHPS PQATYFSSTR AQKLHEFKDR |
| | HPVLTRIASV |
| 51 | IIKIFKVLIG LIILPLGIYW LCQTLCTNSI LPSKNLLKIF |
| | KKQPNTKTLK |
| 101 | TNYLHALQDY SSKNRVASMR RVPILQDNVL IDTLEICLSQ |
| | APTNRWMLIS |
| 151 | LGSDCSLEEI ACKEIFDSWQ RFAKLIGANI LVYNYPGVHS |
| | STGSBSLKDL |
| 201 | ASAHNICTRY LKDKEQGPGA KEIITYGYSL GGLIQAHALR |
| | DQKIVANDDT |
| 251 | TWIAVKDRCP LFISPEGEHS CRRIGKLVAR LFGWGTKAVE |
| | RSQDLPCLBZ |
| 301 | FLYPTDSLRR STVRQNKLLA PELTLAHAIR NSPYVQNKEF |
| | IEVRLSSDID |
| 351 | PIDSKTRVAL ATPILKKLS* |

[1102] The cp7251 nucleotide sequence <SEQ ID 276> is:

| | |
|---|---|
| 1 | ATGGCTCCAA TTCACGGAAG TAATGCGTTT GTTGAGGATA |
| | TTTTACATTC |
| 51 | CCACCCTTCT CCACAAGCGA CTTATTTTTC TTCAACACGC |
| | GCCCAAAAAC |
| 101 | TTCATGAGTT TAAAGACAGG CATCCCGTGC TTACACGGAT |
| | TGCTTCTGTA |
| 151 | ATTATTAAAA TTTTTAAAGT TCTGATAGGG CTGATCATCC |
| | TTCCCTTAGG |
| 201 | AATCTACTGG CTATGTCAAA CGCTTTGTAC AAACTCGATT |
| | CTCCCTTCCA |
| 251 | AGAATTTATT AAAAATTTTC AAGAAGCAAC CCAACACTAA |
| | AACCTTAAAA |
| 301 | ACTAATTATT TGCATGCTTT GCAAGATTAT TCCTCGAAAA |
| | ACCGCGTTGC |
| 331 | TTCCATGAGA CGAGTTCCTA TCCTCCAGGA TAATGTTCTC |
| | ATCGACACTT |
| 401 | TGGAAATATG CCTTTCACAA GCACCTACGA ATCGTTGGAT |
| | GCTCATTTCT |
| 451 | TTAGGAAGTG ACTGTAGCTT GGAAGAAATC GCTTGTAAGG |
| | AGATCTTTGA |
| 501 | TTCTTGGCAA AGATTTGCCA AGTTGATAGG GGCCAATATA |
| | CTCGTTTATA |
| 551 | ACTACCCCGG AGTCATGTCC AGCACAGGGA GCAGCAGCCT |
| | AAAGGACCTA |
| 601 | GCATCAGCTC ATAATATTTG TACAAGATAC CTTAAAGATA |
| | AAGAACAGGG |
| 651 | CCCTGGAGCA AAAGAAATCA TTACCTATGG GTACTCCCTA |
| | GGAGGTTTGA |
| 701 | TACAAGCAGA AGCATTGCCA GACCAGAAGA TTGTTGCAAA |
| | CGATGATACT |
| 751 | ACTTGGATAG CAGTCAAAGA TAGGTGTCCT CTCTTTATAT |
| | CTCCAAAAGG |
| 801 | TTTCCACAGT TGCAGACGCA TAGGAAAGCT AGTAGCTCGT |
| | CTTTTTGGCT |
| 851 | GGGGGACCAA AGCCGTAGAG AGAAGCCAAG ACCTTCCCTG |
| | CCTAGAAATT |
| 901 | TTTCTCTATC CTACGGATTC CTTACGAAGA TCAACAGTCA |
| | GACAGAACAA |
| 951 | GCTCTTAGCA CCTGAACTTA CTCTCGCTCA TGCGATAAAA |
| | AATAGTCCCT |
| 1001 | ATGTTCAAAA TAAAGAATTT ATAGAAGTAC GATTATCGTC |
| | TGATATCGAT |
| 1051 | CCCATCGACA GCAAAACAAG AGTGGCTCTT GCCACACCAA |
| | TTTTGAAAAA |
| 1101 | GCTCTCTTAG |

[1103] The PSORT algorithm predicts inner membrane (0.4545).

[1104] The protein was expressed in E. coli and purified as a GST-fusion product (FIG. 138A). The recombinant protein was used to immunise mice, whose sera were used in a Western blot (FIG. 138B) and for FACS analysis.

[1105] These experiments show that cp7251 is a surface-exposed and immunoaccessible protein, and that it is a useful immunogen. These properties are not evident from the sequence alone.

### Example 139

[1106] The following C. pneumoniae protein (PID 4377288) was expressed <SEQ ID 277; cp7288>:

| | |
|---|---|
| 1 | MHMSNPISLF SPAELIARYN LIPKTSPIYP RRTELIILEE |
| | NACQTRLTNV |
| 51 | AQVLHPSSLF SMSKKILNPC GCSGGPLCWV ELNILAFIIT |
| | SVLFIILLPV |
| 101 | NLIVAGLRLF MPLPPKKIVE DLSEPTTEET NEVIQPFIFA |
| | LQALLFEDNK |
| 151 | LRSFKIVEQS VGKAPLPNPF LNRLVAISPQ ESQEAMRKIP |
| | DLCSQLKKVL |
| 201 | KSLGVLTPEW KHMLKYFEGL KNEHDSNPDK KTFPILIKLL |
| | IEALTGKSSL |
| 251 | PKTPSTKEKM QAALFIASSC KTCKPTWGEV ITRSLNRLYS |
| | IANEGDNQLL |
| 301 | IWVQEFKERE LMSIQDGDDA EEYRFAAQQH GERYTEAIEQ |
| | VLRNESAAKL |
| 351 | QWHVINTMKF FHGKNLGLVT EHLQDTLGAL TLRQTTVDTH |
| | QGREDADLSA |
| 401 | ALFLNKYLNS GNQLVNSVFK SMQIADPETK ALIREFALDI |
| | LYASLELPOT |
| 451 | SAHTEVFSTL LMDPETYEPN KACIAYLLYV LKIIEL* |

[1107] The cp7288 nucleotide sequence <SEQ ID 278> is:

| | |
|---|---|
| 1 | ATGCATATGT CTAACCCCAT CTCTTTGTTT TCCCCTGCAG |
| | AGTTAATAGC |
| 51 | AAAGTACAAT TTAATTCCAA AAACTTCGCC GATTTATCCT |
| | CGGAGGACGG |
| 101 | AACTTATTAT CTTGGAAGAA AATGCGTGTC AAACACGCCT |
| | AACCAACGTG |
| 151 | GCTCAGGTCC TACATCCTTC TAGCCTATTC AGTATGTCAA |
| | AAAAAATACT |
| 201 | GAATCCCTGC GGGTGCTCTG GTGGTCCCTT ATGTTGGGTG |
| | ATTCTCAACA |
| 251 | TCCTAGCATT TATTATTACT TCAGTACTGT TTATCATTCT |
| | TTTACCGGTG |
| 301 | AATCTCATCG TAGCAGGTCT TCGTCTCTTC ATGCCTCTTC |
| | CCCCTAAAAA |
| 351 | AATCGTAGAG GATTTAAGTG AACCTACTAC TGAAGAAACG |
| | AATGAGGTCA |
| 401 | TTCAACCCTT CATTTTCGCT TTGCAAGCGT TGCTTTTTGA |
| | GGATAACAAA |
| 451 | CTTCGCTCTT TTAAAATTGT TGAACAAAGT GTAGGCAAAG |
| | CACCCTTACC |
| 501 | TAATCCCTTT TTAAATAGAC TAGTAGCAAT TTCGCCGCAA |
| | GAAAGCCAAG |
| 551 | AAGCCATGCG GAAGATTCCG GATCTATGCT CACAACTGAA |
| | AAAAGTATTA |
| 601 | AAGTCTCTAG GCGTGCTAAC TCCAGAATGG AAGCACATGC |
| | TGAAGTACTT |
| 651 | TGAGGGACTG AAAAACGAAC ATGATAGTAA TCCTGATAAA |
| | AAGACGTTCC |
| 701 | CAATATTGAT CAAGCTCCTC ATAGAACCTC TTACTGGAAA |
| | GTCCTCTTTA |
| 751 | CCCAAAACTC CTAGTACAAA GGAAAAAATG CAAGCGGCCT |
| | TATTTATTGC |
| 801 | AAGTTCTTGC AAGACTTGTA AGCCGACTTG GGGAGAAGTC |
| | ATAACCAGAT |
| 851 | CTCTTAACAG ACTCTATAGT ATAGCTAATG AAGGAGACAA |
| | TCAGCTTCTG |
| 901 | ATTTGGGTTC AAGAGTTTAA AGAACCAGAG CTGATGTCCA |
| | TCCAAGATGG |
| 951 | TGATGATGCT GAAGAGTATC GGTTTGCGGC TCAGCAACAC |
| | GGTGAGCGTT |
| 1001 | ACACAGAGGO AATAGAACAA GTTCTACGAA ACGAGTCAGC |
| | AGCCAAACTA |
| 1051 | CAATGGCATG TGATCAACAC TATGAAATTC TTCCATGGGA |
| | AAAATCTCGG |
| 1101 | TCTAGTTACA GAACACCTAC AAGATACTCT CGGCGCCCTA |
| | ACTTTACGTC |
| 1151 | AAACTACAGT GGACACACAT CAAGGCAGAG AAGACCCTGA |
| | TTTGTCAGCT |
| 1201 | GCTCTTTTCC TAAATAAGTA TTTAAATTCT GGAAATCAAC |
| | TTGTTAATAG |
| 1251 | CGTCTTTAAA TCCATGCAAA AAGCAGATCC AGAAACCAAA |
| | GCTTTAATCC |
| 1301 | GTGAGTTTGC TCTAGATATA TTATATGCAT CCTTACGGCT |
| | TCCTCAAACT |
| 1351 | TCCGCTCATA CCGAGGTCTT TTCTACACTC TTAAPGGACC |
| | CAGAGACCTA |
| 1401 | TGAACCTAAT AAAGCTTGTA TCGCCTACTT GCTCTATGTA |
| | TTAAAGATCA |
| 1451 | TCGAACTATA A |

[1108] The PSORT algorithm predicts inner membrane (0.5989).

[1109] The protein was expressed in E. coli and purified as a GST-fusion product (FIG. 139A). The recombinant protein was used to immunise mice, whose sera were used in a Western blot (FIG. 139B) and for FACS analysis.

[1110] These experiments show that cp7288 is a surface-exposed and immunoaccessible protein, and that it is a useful immunogen. These properties are not evident from the sequence alone.

### Example 140

[1111] The following C. pneumoniae protein (PID 4377359) was expressed <SEQ ID 279; cp7359>:

| | |
|---|---|
| 1 | MPGSVSSPPL SPVIVRERVP SSSGSDLIQP HAVLKISILI FALVTILGIV |
| 51 | LVVLSSALGA LPSYVLTVSG CIAIAVGLIG LGILVTRLIL STIRKVDAMG |
| 101 | YDAAVKEEQY LSRIRELESE NREIRDRNRA VEDQCAHLSE ENKDLRDPEY |
| 151 | LHGMTERLIA SLEIENQALV AENILLKDWN ASLSRDFRAY KQKFPLGALE |
| 201 | PWKEDIACIM EQNLFLKPEC IAMVKSLPLE TQRLFLYPKG FQSLVNRPAP |
| 251 | RSRFFQTPKY EYNSRNENED GKVAAVCARL KKEFFSAVLG ACSYEELGGI |
| 301 | CERAVALKET LPLPEAVYDT LVQEFPNLLT AESLWKEWCF YSYPYLRPYL |
| 351 | SVDYCKRLFV QLFEELCLKL FTTGSPEDQA LVRLFSYYRN HIPAVLASFG |
| 401 | LPPPETGGSV FVLLPKQENL LWSQIEVLAT RYLKDTFVRN SEWTGSFEMM |
| 451 | FSYNEMCKEI SEGRIRFAED YETRHSEEFP PSPLSBEGEG EEFLPPCSEE |
| 501 | EVSVLERPDL DVDSMWVWUP PVPKGPL* |

[1112] The cp7359 nucleotide sequence <SEQ ID 280> is:

| | |
|---|---|
| 1 | ATCCCAGGTT CTGTGTCATC ACCTCCTTTG TCTCCTGTAA TTGTCCGTGA |
| 51 | AAGGGTCCCA TCCTCTTCAG GATCCGACCT CATACAGCCT CATGCTGTTT |
| 101 | TAAAGATCTC CATCCTAATT TTTGCGCTTG TGACAATTTT AGGAATTGTT |
| 151 | CTTGTAGTGT TGTCTAGTGC TTTAGGAGCT CTTCCTAGTT TAGTTTTGAC |
| 201 | GGTTTCTGGT TGTATTGCAA TAGCTGTAGG CCTGATTGGT TTAGGGATTC |
| 251 | TTGTGACACG GCTGATTCTC TCTACGATCA GAAAAGTAGA TGCCATGGGT |
| 301 | TATGATGCTG CGGTCAAAGA AGAGCAGTAT TTGTCACGTA TCAGAGAATT |
| 351 | AGAGTCTGAA AATAGAGAGA TTAGAGATAG AAATCGTGCT GTCGAAGATC |
| 401 | AGTGTGCCCA TTTATCCGAA GAGAACAAGG ACCTTAGGGA TCCCGAATAT |
| 451 | CTACATGGAA TGACTGAAAG GCTCATTGCG AGCTTAGAAA TAGAGAATCA |
| 501 | AGCTCTCGTA GCTGAGAACA TTCTTCTCAA AGACTGGAAT GCAAGCCTAT |
| 551 | CTAGAGATTT CCGCGCATAT AAGCAAAAAT TTCCTCTTGG GGCATTAGAA |
| 601 | CCCTGGAAAG AAGATATTGC ATGTATCATG GAACAAAATC TCTTTTTAAA |
| 651 | ACCGGAATGT ATCGCGATGG TTAAGTCTCT TCCATTAGAG ACGCAACGGC |
| 701 | TGTTTTTATA TCCAAAAGGA TTTCAGTCTT TAGTTAATCG ATTTGCTCCG |
| 751 | CGGTCTCGCT TTTTCCAGAC TCCAAAGTAT GAATATAACA GTAGGAATGA |
| 801 | AAATGAGGAC GGAAAGGTAG CCGCAGTGTG CGCCCGTTTG AAAAAAGAAT |
| 851 | TCTTCAGTGC TGTTTTAGGA GCCTGTAGTT ACGAAGAACT ACGGGGCATT |
| 901 | TGTGAAAGAG CAGTAGCACT TAAAGAGACG TTGCCATTGC CTGAAGCTGT |
| 951 | CTATGATACC CTAGTTCAGG AGTTCCCAAA TCTTCTTACT GCTGAGAGTT |
| 1001 | TATGGAAAGA ATGGTGCTTC TATTCCTATC CCTACCTTCG TCCCTATCTT |
| 1051 | TCTGTGGATT ACTGTAAGAG GTTATTTGTA CAACTTTTTG AGGAACTCTG |
| 1101 | CCTAAAGCTT TTTACAACGG GATCTCCAGA AGACCAAGCT TTGGTTCCCC |
| 1151 | TTTTCTCTTA CTATAGGAAT CATATTCCCG CAGTCTTGGC CTCATTTGGT |
| 1201 | TTCCCCCCGC CTGAGACAGG GGGGTCTGTA TTTGTATTGC TACCAAAAGA |
| 1251 | AGAAAACCTT CTTTCGAGTC AAATTGAGGT GCTGGCTACA AGGTATCTCA |
| 1301 | AAGATACCTT CGTGAGAAAC TCAGAATGGA CGGGCTCTTT CGAGATGATG |
| 1351 | TTTTCTTATA ACGAGATGTG TAAGGAGATC TCCGAAGGAA GGATTCGTTT |
| 1401 | TGCTGAAGAC TATGAAACGA GGCATTCCGA AGAATTCCCT CCTTCCCCTC |
| 1451 | TCTCTGAAGA AGGAGAGGGC GAAGAATTCC TTCCTCCTTG CTCTGAAGAA |
| 1501 | GAGGTTTCGG TTCTTGAGCG CCCAGATCTA GATGTAGACT CTATGTGGGT |
| 1551 | CTGGCATCCG CCGGTCCCTA AGGGACCTCT TTAA |

[1113] The PSORT algorithm predicts inner membrane (0.7453).

[1114] The protein was expressed in E. coli and purified as a GST-fusion product (FIG. 140A). The recombinant protein was used to immunise mice, whose sera were used in a Western blot (FIG. 140B) and for FACS analysis.

[1115] These experiments show that cp7359 is a surface-exposed and immunoaccessible protein, and that it is a useful immunogen. These properties are not evident from the sequence alone.

### Example 141

[1116] The following C. pneumoniae protein (PID 4377374) was expressed <SEQ ID 281; cp7374>:

| | |
|---|---|
| 1 | MDKQSSGNSG CIWHPFTQSA LDSTPIKIVR GEGAYLYABS GTRYLDAISS |
| 51 | WWCNLHGHGH PYITKKLCEQ AQKLEHVIFA NFTHEPALEL VSKLAPLLPE |
| 101 | GLERFFFSDN GSTSIEIAMK IAVQYYYNQN KARSHFVGLS NAYHGDTFGA |
| 151 | MSIAGTSPTT VPFHDLFLPS STIAAPYYGK EELAIAQAKT VFSESNIAAF |
| 201 | IYEPLLQGAG GMLMYNPEGL KEILKLAKHY GVLCIADEIL TGFGRTGPLF |
| 251 | ASEPTDIPPD IICLSKGLTG GYLPLALTVT TKEIHDAFVS QDRMKALLHG |
| 301 | HTFTGNPLGC SAALASLDLT LSPBCLQQRQ MIERCHQEFQ EAHGSLWQRC |
| 351 | EVLGTVLALD YPAEATGYFS QYRDHLNRFF LEFGVLLRPL GNTLYVLPPY |
| 401 | CIQEEDLRII YSHLQDALCL QPQ* |

[1117] The cp7374 nucleotide sequence <SEQ ID 282> is:

| | |
|---|---|
| 1 | ATGGACAAGC AATCATCAGG GAATTCAGGG TGTATCTGGC ACCCCTTCAC |
| 51 | TCAATCTGCA TTAGATTCTA CACCCATAAA GATTGTAAGG GGAGAAGGTG |
| 101 | CTTACCTCTA TGCGGAATCA GGAACAAGAT ATCTTGATGC GATATCTTCA |
| 151 | TGGTGGTGCA ACCTCCACGG TCATGGGCAT CCCTACATTA CAAAAAAATT |
| 201 | ATGTGAGCAA GCACAGAAGT TAGAACATGT GATCTTCGCA AATTTCACCC |
| 251 | ATGAACCGGC TCTAGAGCTC GTATCGAAAC TCGCTCCCCT CCTTCCTGAA |
| 301 | GGTCTAGAAC GTTTCTTTTT CTCTGACAAC GGATCAACGT CTATCGAAAT |
| 351 | AGCAATGAAA ATTGCTGTGC AATATTACTA CAATCAAAAC AAGGCTAAGA |
| 401 | GCCATTTTGT TGGACTCAGC AATGCCTATC ACGCAGATAC ATTTGGAGCT |
| 451 | ATGTCGATAG CTGGCACGAG CCCTACTACA GTTCCCTTTC ATGATCTTTT |
| 501 | TCTTCCTTCC AGTACAATTG CTGCTCCCTA TTATGGCAAG GAAGAGCTTG |
| 551 | CCATTGCCGA AGCAAAAACA GTCTTTTCTG AAAGCAATAT CGCAGCGTTT |
| 601 | ATCTATGAGC CGCTATTGCA AGGTGCTGGA GGGATGTTAA TGTATAATCC |
| 651 | CGAAGGCCTA AAGGAGATTC TCAAGCTTGC CAAGCATTAC GGGGTTCTCT |
| 701 | GTATTGCTGA TGAAATTCTT ACTGGCTTTG GCCGTACGGG TCCACTGTTT |
| 751 | GCTTCTGAAT TTACAGACAT TCCTCCTGAC ATTATCTGTC TCCACTGTTT |
| 801 | TCTTACAGGA GGCTATCTCC CTCTAGCCTT GACAGTAACC ACTAAAGAAA |
| 851 | TTCATGATGC CTTTGTCTCC CAAGATCGGA TGAAGGCACT GCTTCATGGC |
| 901 | CATACCTTCA CAGGAAATCC TTTAGGCTGT AGTGCPGCCC TCGCTTCTTT |
| 951 | GGATCTCACC CTATCTCCAG AATGCCTACA AGAAAGGCAA ATGATAGAAC |
| 1001 | GGTGTCATCA AGAGTTTCAA GAAGCTCATG GTTCCCTATG GCAACGGTGT |
| 1051 | GAGGTTCTGG GCACGGTACT CGCTCTAGAT TACCCTGCAG AAGCTACAGG |
| 1101 | ATATTTTTCA CAATATAGAG ACCATCTCAA TCGCTTTTTC TTAGAACGTG |
| 1151 | GAGTCCTTCT TCGTCCTTTA GGGAACACAC TGTATGTGCT GCCCCCCTAC |
| 1201 | TGTATCCAAG AAGAAGATCT CCGGATTATT TATTCTCACC TACAGGATGC |
| 1251 | CCTATGTCTA CAACCACAGT AA |

[1118] The PSORT algorithm predicts cytoplasm (0.2930).

[1119] The protein was expressed in E. coli and purified as a GST-fusion product (FIG. 141A) and also in his-tagged form. The recombinant proteins were used to immunise mice, whose sera were used in a Western blot (FIG. 141B) and for FACS analysis.

[1120] These experiments show that cp7374 is a surface-exposed and immunoaccessible protein, and that it is a useful immunogen. These properties are not evident from the sequence alone.

### Example 142

[1121] The following C. pneumoniae protein (PID 4377377) was expressed <SEQ ID 283; cp7377>:

| | |
|---|---|
| 1 | MREETVSWSL EDIREIYHTP VFELIHKANA ILRSNFLHSE LQTCYLISIK |
| 51 | TGGCVEDCAY CAQSSRYHTH VTPEPMMKIV DVVERAKRAV ELGATRVCLG |
| 101 | AAWRNAKODR YFDRVLAMVK SITDLGABVC CALGMLSEEQ AKKLYDAGLY |
| 151 | AYNHNLDSSP EFYETIITTR SYEDRLNTLD VVNKSGISTC CQGXVGMGES |
| 201 | EEDRIKLLHV LATRDHIPES VPVNLLWPID GTPLQDQPPI SFWEVLRTIA |
| 251 | TARVVFPRSM VRLAAGRAFL TVEQQTLCFL AGANSIFYGD KLLTVENNDI |
| 301 | DEDAEMIKLL GLIPRPSFGI ERGNPCYANN S* |

[1122] The cp7377 nucleotide sequence <SEQ ID 284> is:

| | |
|---|---|
| 1 | ATGCGTGAAG AAACTGTATC CTGGTCATTA GAAGACATCC GCGAAATTTA |
| 51 | TCACACTCCC GTATTTGACC TGATTCACAA AGCCAATGCC ATATTGCGTA |
| 101 | GTAATTTCCT CCATTCAGAA CTGCAGACTT GCTATCTGAT TTCGATTAAA |
| 151 | ACTGGTGGAT GCGTTGAAGA TTGCGCCTAC TGTGCCCAAT CTTCCCGCTA |
| 201 | TCATACCCAC GTCACACCAG AACCTATGAT GAAAATTGTA GACGTTGTGG |
| 251 | AAAGGGCAAA ACGTGCTGTA GAGCTAGCCG CCACTCGTGT GTGTCTTGGG |
| 301 | GCTGCCTGGC GCAATGCTAA GGACGATCGA TACTTTGATA GAGTCCTCGC |
| 351 | TATGGTGAAA AGTATCACAG ATCTCGGAGC CGAGGTTTGT TGTGCTTTAG |
| 401 | GCATGCTCTC CGAAGAGCAA GCTAAAAAAC TGTATGATGC AGGACTTTAT |
| 451 | GCCTACAATC ATAATTTAGA CTCTTCTCCG GAATTCTATG AAACTATAAT |
| 501 | CACAACACGT TCTTATGAAG ATCGCCTCAA CACTCTTGAT GTAGTAAATA |
| 551 | AATCTGGCAT TAGTACATGC TGCGGTGGTA TTGTAGGTAT GGGAGAATCT |
| 601 | GAAGAAGACC GTATAAAGCT TCTTCATGTT CTTGCAACAA GAGATCATAT |
| 651 | CCCAGAATCC GTACCTGTAA ATTTACTTTG GCCGATTGAC GGCACGCCTT |
| 701 | TGCAAGACCA GCCTCCGATT TCTTTCTGGG AAGTCTTGCG AACCATAGCA |
| 751 | ACGGCACGGG TTGTTTTCCC CAGATCCATG GTACGACTTG CTGCAGGACG |
| 801 | CGCTTTCCTC ACAGTAGAAC AACAAACCTT ATGTTTTCTA GCCGGTGCCA |
| 851 | ACTCCATATT CTATGGAGAT AAACTGTTGA CTGTAGAAAA CAATGATATA |
| 901 | GATGAAGATG CTGAAATGAT CAAACTTTTA GGCTTAATCC CTCGCCCTTC |
| 951 | ATTTGGAATA GAAAGAGGTA ACCCATGTTA TGCCAACAAT TCCTAA |

[1123] The PSORT algorithm predicts cytoplasm (0.2926).

[1124] The protein was expressed in E. coli and purified as a GST-fusion product (FIG. 142A) and also in his-tagged form. The recombinant proteins were used to immunise mice, whose sera were used in a Western blot (FIG. 142B) and for FACS analysis.

[1125] These experiments show that cp7377 is a surface-exposed and immunoaccessible protein, and that it is a useful immunogen. These properties are not evident from the sequence alone.

### Example 143

[1126] The following C. pneumoniae protein (PID 4377407) was expressed <SEQ ID 285; cp7407>:

| | |
|---|---|
| 1 | MVCPNNSWPR MCGNFNCEWV EVTTTEETTR QSASDISEEA GSSGGAAPIT |
| 51 | TQPTKITKVE KRVQFNTAQG DESTIHMIQE AGELVDSILS HRRTQGCTEY |
| 101 | CYDSYATGCG QRCGSFGRLI CGTYKACCLD REDNQVAGLV HECEQTHGPI |
| 151 | AVALAAKTMG LNLMELVEKN TILSEEQKNE FRQHCSBAKT QLYGTMQSLS |
| 201 | QNFFLEGVNS IRERGLDDSL VQAVLSFIAT RSWEKTIESE EASGTSSASN |
| 251 | STRIPACYIL NTSPLTTSRL SCGSRDAPXP SSVGAEPQYV AKKYNDNGMA |
| 301 | RQLGKIQVTN LKTGDFSALG PFGLLIVKML NSFLLSASQS TSSILKHTGG |
| 351 | EICYTCPNFR DIVVLLMLAI GYCPANTDBT SVVDIHMIDD PIMTIFYELQ |
| 401 | YSYRTGRTSA SFLKKKPSLV RQESLDCPTP AESVPLMSSL EEEDENEDDD |
| 451 | EDGNLAYQQR ILECSGULQT LFLGIKINKE * |

[1127] The cp7407 nucleotide sequence <SEQ ID 286> is:

| | |
|---|---|
| 1 | ATGGTTTGCC CAAATAATTC TTGGTTCAGA ATGTGTGGAA ATTTCAACTG |
| 51 | CGAATGGGTT GAAGTAACAA CAACAGAAGA AACAACGCGG CAATCGGCTT |
| 101 | CAGATATAAG CGAAGAAGCT GGTTCGAGTG GAGGAGCTGC TCCTATAACT |
| 151 | ACGCAACCTA CTAAAATTAC AAAAGTAGAG AAACGTGTCC AATTTAATAC |
| 201 | TGCTCAAGGT GATGAAAGTA CAATAOACAT GATCCAAGAA GCAGGAGAAT |
| 251 | TGGTAGACTC CATTCTATCA CATAGACGAA CGCAAGGATG TACAGAGTAT |
| 301 | TGTTATGACA GTTACGCAAC TGGATGTGGT CAGCGTTGCG GATCTTTTGG |
| 351 | AAGACTCATT TGTGGAACGT ATAAAGCGTG TTGCTTAGAC AGAGAGGATA |
| 401 | ATCAGGTTGC TGGACTTGTC CATGAATGCG AACAGACCCA TGGTCCTATT |
| 451 | GCCGTTGCTT TAGCTGCTAA AACTATGGGC CTCAACTTAA TGGAACTTGT |
| 501 | AGAAAAAAAC ACTATTTTGT CTGAAGAACA GAAAAATGAA TTTAGACAGC |
| 551 | ATTGCTCGGA AGCTAAAACC CAACTCTATG GAACGATGCA GAGCCTTTCT |
| 601 | CAAAACTTTT TCCTTGAAGG AGTCAACAGC ATTAGAGAAC GCGGTCTAGA |
| 651 | CGATTCACTA GTCCAAGCCG TGCTAAGCTT TATTGCTACA AGGTCTTGGG |
| 701 | AAAAAACTAT AGAATCAGAG GAAGCCTCAG GAACATCTTC TGCTTCTAAT |
| 751 | TCTACACGCA TTCCTGCGTG CTATATCTTA AATACGAGCC CCTTAACGAC |
| 801 | GTCACCCCTA TCCTGTGGAT CAAGAGATGC GCGACGCCCA TCTTCAGTCG |
| 851 | GTGCAGAGCC CCAGTACGTA GCAAAAAAAT ACAATGACAA TGGCATGGCC |
| 901 | AGACAATTAG GAAAAATCCA AGTCACCAAT CTAAAAACAG GAGATTTTTC |
| 951 | AGCTTTAGGT CCTTTTGGTC TCCTGATTGT GAAAATGCTG AATAGCTTTC |
| 1001 | TCTTATCTGC ATCACAAAGC ACATCTTCTA TTCTAAAGCA CACAGGTGGA |
| 1051 | GAAATATGTT ATACGTGCCC AAATTTTCGT GATATCGTCG TTTTATTGAT |
| 1101 | GTPAGCGATT GGCTATTGCC CTGCAAATAC CGATGAGACA TCTGTCGTAG |
| 1151 | ATATACACAT GATAGATGAT CCGATTATGA CCATCTTCTA TCGACTACAA |
| 1201 | TACAGCTATA GAACAGGGAA AACTTCAGCA TCGTTTTTAA AAAAGAAACC |
| 1251 | CTCATTAGTA AGACAGGAAA GTCTTGATTG TCCTACCCCT GCAGAATCTG |
| 1301 | TCCCTCTCAT GTCAAGTCTC GAAGAAGAAG ATGAAAATGA AGATGATGAT |
| 1351 | GAGGATGGGA ATTTGGCGTA TCAACAGCGT ATCCTTGAAT GCTCGGGTCA |
| 1401 | TTTACAAACT CTATTTTTAG GGATAAAAAT AAACAAAGAA TAA |

[1128] The PSORT algorithm predicts inner membrane (0.1319).

[1129] The protein was expressed in E. coli and purified as a GST-fusion product (FIG. 143A). The recombinant protein was used to immunise mice, whose sera were used in a Western blot (FIG. 143B) and for FACS analysis.

[1130] These experiments show that cp7407 is a surface-exposed and immunoaccessible protein, and that it is a useful immunogen. These properties are not evident from the sequence alone:

### Example 144

[1131] The following C. pneumoniae protein (PID 4376432) was expressed <SEQ ID 287; cp6432>:

| | |
|---|---|
| 1 | MTRSTIESSD SLCSRSFSQK LSVQTLKNLC ERSLMKITSL VIAFLTLIVG |
| 51 | GALIALAGGO VLSFPLGLIL GSVLVLFSSX YLVSCCKFFT LKEMTMTCSV |
| 101 | KSKINIWFEK QRNKDIEKAL ENPDLFGENK RNVGNRSARN QLEMILHETD |
| 151 | GIILKRYNKG ARMYFYL* |

[1132] The cp6432 nucleotide sequence <SEQ ID 288> is:

| | |
|---|---|
| 1 | ATGACTAGAA GTACTATTGA AAGCAGTGAT TCGCTATGCT CAAGGTCTTT |
| 51 | TTCTCAAAAA TTAAGTGTCC AGACATTAAA AAATCTCTGT GAAAGTAGAT |
| 101 | TAATGAAGAT CACTTCTCTT GTGATTGCTT TCCTAACTCT AATTGTGGGG |
| 151 | GGTGCTCTTA TAGCTTTAGC AGGAGGGGGG GTTCTTTCTT TCCCTCTTGG |
| 201 | GCTAATCTTA GGAAGCGTAC TCGTTTTGTT TTCTTCTATC TATTTAGTCT |
| 251 | CTTGTTGTAA ATTTTTTACT TTAAAAGAGA TGACAATGAC CTGTAGTGTC |
| 301 | AAATCTAAAA TCAATATATG GTTTGAAAAG CAACGAAACA AAGACATCGA |
| 351 | AAAGGCATTA GAGAATCCAG ATCTCTTTGG AGAAAATAAG AGAAATGTTG |
| 401 | GAAATCGTTC GGCAAGAAAT CAACTAGAAA TGATCTTACA CGAGACTGAC |
| 451 | GGAATTATTT TGAAAAGATA TATGAAAGGA GCTAAAATGT ACTTTTATTT |
| 501 | ATGA |

[1133] The PSORT algorithm predicts inner membrane (0.5394).

[1134] The protein was expressed in E. coli and purified as a his-tagged product (FIG. 144A). The recombinant protein was used to immunise mice, whose sera were used in a Western blot (FIG. 144B) and for FACS analysis.

[1135] These experiments show that cp6432 is a surface-exposed and immunoaccessible protein, and that it is a useful immunogen. These properties are not evident from the sequence alone.

### Example 145

[1136] The following C. pnuemoniae protein (PID 4376433) was expressed <SEQ ID 289; cp6433>:

| | |
|---|---|
| 1 | MNWVPKTIDH VDPESEIDIR KVVSCYKLIK ECQPEFRSLI SELLGVIRCG |
| 51 | LRLLKRSKYQ EQARTVSDED APLFCLTRSY YQDGYLTPLR AGPRDLINHY |
| 101 | IHLRRRENPK HFFSPKHPCY YARLAFNESV CVYRELFDIE RLTKMYVEGD |
| 151 | YSKEQEKNLQ AILSFVKTLD EGKDFLIEHK DTDLIGRGFT DVFCT* |

[1137] The cp6433 nucleotide sequence <SEQ ID 290> is:

| | |
|---|---|
| 1 | ATGAATTGGG TTCCAAAAAC AATAGACCAT GTAGATCCAG AATCAGAGAT |
| 51 | AGATATACOT AAAGTCGTCT CCTGCTATAA GTTGATAAAA GAATGTCAAC |
| 101 | CTGAATTTCG ATCTCTTATA AGTGAATTAC TAGGAGTGAT TCGGTGTGGC |
| 151 | TTAAGACTAT TAAAACGTTC TAAGTATCAA GAACAGGCTA GAACTGTATC |
| 201 | TGATGAAGAT GCACCTCTTT TCTGCCTGAC TCGTTCTTAT TATCAAGATG |
| 251 | GTTATCTCAC GCCATTAAGA GCAGGACCTC GTGATCTTAT AAATCACTAT |
| 301 | ATACACTTGC GTCGCCGAGA GAATCCTAAG CATTTTTTCA GTCCTAAGCA |
| 351 | TCCATGTTAT TATGCTCGAT TGGCTTTTAA TGAGTCAGTG TGTGTCTATA |
| 401 | GAGAACTCTT TGATATAGAG CGACTTACAA AAATGTATGT CGAGGGTGAT |
| 451 | TATTCTAAAG AACAAGAGAA AAACCTACAG GCTATTCTTA GTTTTGTGAA |
| 501 | AACTCTAGAT GAAGGAAAGG ACTTTCTTAT TGAACATAAA GATACCGATC |
| 551 | TCATTGGGAG AGGTTTTACT GATGTGTTCT GCACTTAA |

[1138] The PSORT algorithm predicts cytoplasm (0.4068).

[1139] The protein was expressed in E. coli and purified as a his-tagged product (FIG. 145A). The recombinant protein was used to immunise mice, whose sera were used in a Western blot (FIG. 145B) and for FACS analysis.

[1140] These experiments show that cp6433 is a surface-exposed and immunoaccessible protein, and that it is a useful immunogen. These properties are not evident from the sequence alone.

### Example 146

[1141] The following C. pneumoniae protein (PID 4376643) was expressed <SEQ ID 291; cp6643>:

| | |
|---|---|
| 1 | MGYLPVSATD VLFESPAAPL INSANTQNQK LIELKGKQQA ESSPRTITSV |
| 51 | ILBVLLVIGC CLIVLSLLAI RPALQFTLET GHPAAIAVLA VSGTILLVAV |
| 101 | IILFCFLAAV PFAAKKTYKY VKTVDDYASW HSHQQTPTLG TIFSGIVYAE |
| 151 | SQAQL* |

[1142] The cp6643 nucleotide sequence <SEQ ID 292> is:

| | |
|---|---|
| 1 | ATGGGATATC TTCCAGTATC TGCTACGGAC GTTCTTTTTG AAAGTCCAGC |
| 51 | CGCTCCCTTA ATCAATAGCG CAAACACACA AAATCAGAAA CTCATAGAAC |
| 101 | TCAAGGGGAA GCAGCAAGCT GAGTCTTCTC CACGGACAAT CACTTCTGTC |
| 151 | ATATTGGAAG TTCTCCTAGT GATCGGATGC TGCCTCATAG TTCTTAGTTT |
| 201 | ATTGGCAATC CGCCCTGCTC TGCAATTCAC TCTAGAAACT GGACATCCAG |
| 251 | CTGCCATTGC AGTCCTTGCT GTCTCAGGAA CAATTCTATT GGTGGCTGTT |
| 301 | ATCATCTTGT TTTGCTTTCT AGCAGCTGTG CCATTCGCTG CTAAGAAAAC |
| 351 | TTATAAATAT GTTAAGACGG TTGATGACTA TGCTTCTTGG CATTCTCATC |
| 401 | AGCAAACACC GACCCTAGGC ACTATCTTTT CAGGTATCGT CTATGCAGAA |
| 451 | TCCCAGGCGC AATTATAG |

[1143] The PSORT algorithm predicts inner membrane (0.6859).

[1144] The protein was expressed in E. coli and purified as a his-tagged product (FIG. 146A). The recombinant protein was used to immunise mice, whose sera were used in a Western blot (FIG. 146B) and for FACS analysis.

[1145] These experiments show that cp6643 is a surface-exposed and immunoaccessible protein, and that it is a useful immunogen. These properties are not evident from the sequence alone.

### Example 147

[1146] The following C. pneumoniae protein (PID 4376722) was expressed <SEQ ID 293; cp6722>:

| | |
|---|---|
| 1 | VSSTLNGVFP SSLPEESADL FITNKEIVAL GEKGNVFLTH SIPMHIAAIT |
| 51 | ILVIVALAGI AIICLGCYSQ SILLIAVGIV LTILTLLCLQ ALVGGIKFIR |
| 101 | QLPQQLHTTV QFIREKIRPE SSLQLVTNAQ RKTTQDTLKL YEELCDLSQK |
| 151 | EFKLQSTLYQ KRPELSHKNE RTNQN* |

[1147] The cp6722 nucleotide sequence <SEQ ID 294> is:

| | |
|---|---|
| 1 | GTGTCTAGTA CTTTAAACGG GGTATTTCCC TCATCCCTTC CGGAAGAGTC |
| 51 | TGCTGATTTA TTCATTACGA ATAAGGAGAT CGTAGCTTTG GGGGAGAAGG |
| 101 | GCAATGTTTT TCTCACCCAC TCCATTCCTA TGCATATTGC TGCGATTACG |
| 151 | ATCTTAGTGA TTGTAGCTCT TGCTGGAATC GCTATTATCT GTTTGGGTTG |
| 201 | CTATAGCCAA AGCATTCTGT TGATTGCCGT TGGCATTGTT CTTACTATTT |
| 251 | TGACTCTTCT CTGCCTACAA GCCTTGGTAG GATTTATTAA ATTCATCCGG |
| 301 | CAGCTCCCTC AGCAGCTCCA TACGACAGTA CAATTTATCA GGGAGAAGAT |
| 351 | TCGACCTGAA TCCTCTCTAC AGCTTGTAAC CAATGCACAG AGAAAAACCA |
| 401 | CTCAAGATAC GCTAAAGTTA TACGAAGAAC TCTGCGACCT CTCACAAAAA |
| 451 | GAGTTCAAAC TGCAATCAAC TCTTTATCAA AAACGTTTTG AGCTTTCTCA |
| 501 | CAAGAATGAA AAGACAAATC AAAACTAG |

[1148] The PSORT algorithm predicts inner membrane (0.6668).

[1149] The protein was expressed in E. coli and purified as a his-tagged product (FIG. 147A). The recombinant protein was used to immunise mice, whose sera were used in a Western blot (FIG. 147B) and for FACS analysis.

[1150] These experiments show that cp6722 is a surface-exposed and immunoaccessible protein, and that it is a useful immunogen. These properties are not evident from the sequence alone.

### Example 148

[1151] The following C. pneumoniae protein (PID 4377253) was expressed <SEQ ID 295; cp7253>:

| | |
|---|---|
| 1 | MSELAPCSTG LQMVPHTQVH HALDTRRVIL TIAACLSLIA GIVLVGLGAA |
| 51 | AILPSLFGVI GGMIIILFSS IALIYLYKKT RBVDQIALEP LPEMISKDQS |
| 101 | IIDFVKTRDY ASLEKXATFA YTHTHYYDGS MVFYREIPRF MLGSYLALRK |
| 151 | DNDRQALF* |

[1152] The cp7253 nucleotide sequence <SEQ ID 296> is:

| | |
|---|---|
| 1 | ATGAGCGAGC TCGCCCCCTG CTCGACAGGA TTGCAGATGG TCCCCCATAC |
| 51 | GCAGGTCCAT CATGCCCTTG ATACGCGGAG AGTCATTCTA ACGATAGCCG |
| 101 | CCTGTCTGTC TTTAATTGCA GGAATCGTGT TGGTTGGCTT AGGTGCTGCA |
| 151 | GCAATCCTGC CCTCGCTTTT TGGAGTCATT GGAGGAATGA TTCTTATTCT |
| 201 | GTTTTCTTCG ATCGCCCTCA TTTATTTATA CAAGAAGACA AGGGAGGTGG |
| 251 | ATCAGATTGC TCTGGAGCCT CTTCCTGAGA TGATTTCTAA AGATCAAAGC |
| 301 | ATTATAGATT TTGTAAAGAC ACGAGACTAT GCATCTTTAG AAAAGAAAGC |
| 351 | GACCTTTGCT TATACTCATA CTCATTATTA CGATGGAAGC ATGGTCTTCT |
| 401 | ATAGGGAGAT CCCTAGATTT ATGTTAGGCT CTTATCTCGC GCTTCGCAAA |
| 451 | GACATGGACC GCCAAGCTCT TTTTTGA |

[1153] The PSORT algorithm predicts inner membrane (0.5394),

[1154] The protein was expressed in E. coli and purified as a his-tagged product (FIG. 148A). The recombinant protein was used to immunise mice, whose sera were used in a Western blot (FIG. 148B) and for FACS analysis.

[1155] These experiments show that cp7253 is a surface-exposed and immunoaccessible protein, and that it is a useful immunogen. These properties are not evident from the sequence alone.

### Example 149

[1156] The following C. pneumoniae protein (PID 4376264) was expressed <SEQ ID 297; cp6264>:

| | |
|---|---|
| 1 | VISGLLFLLV RRRVPTVRSE EIPRGVSVTP SEEPALBKAQ KEPETKKILD |
| 51 | RLPKELDQLD TYIQEVDACL ERLRDPKYED RGLLTEAXEK LRVFDVVEIG |
| 101 | MMSEFLDIQR VLNEEAYYVE HCQDPLENIA YBIFSSQELP DYYCAGVCGY |
| 151 | LPSGDARADR LKRSVKEVMD RFMRVTWKSW EASVMLDHSY GVARELFKKA |
| 201 | VGVLEESVYK ILFKSYRDAF YECEKMCIQR DGRFKWL* |

[1157] The cp6264 nucleotide sequence <SEQ ID 298> is:

| | |
|---|---|
| 1 | GTGATTTCGG GACTTCTATT CCTTCTAGTA AGACGAGAGG TTCCGACAGT |
| 51 | ACGTTCAGAG GAAATTCCCA GAGGGGTTTA TGTGACCCCT TCTGAAGAGC |
| 101 | CTGCTCTAGA GAAGGCTCAA AAAGAACCGG AGACAAAGAA AATTTTAGAT |
| 151 | CGGTTGCCGA ACGAATTGGA TCAGTTAGAT ACGTATATTC AGGAAGTGTT |
| 201 | TGCATGTTTA GAGAGGCTGA AGGATCCTAA GTACGAAGAT CGAGGTCTTT |
| 251 | TAACAGAGGC GAAGGAGAAA CTTCGAGTTT TTGACGTTGT TGAGAAAGAT |
| 301 | ATGATGTCAG AGTTTTTAGA CATACAACGA GTGTTGAATG AGGAAGCATA |
| 351 | TTATGTAGAA CATTGTCAAG ATCCCCTAGA GAATATAGCC TACGAGATTT |
| 401 | TCTCTTCCCA AGAGCTTCGT GATTACTACT GTGCAGGGGT GTGTGGGTAT |
| 451 | TTGCCTTCTG GGGATGCTCG AGCGGATCGA TTAAAGAGAT CAGTTAAGGA |
| 501 | GGTAATGGAT CGCTTTATGA GGGTGACCTG GAAATCTTGG GAGGCATCAG |
| 551 | TCATGTTGGA TCATAGCTAT GGGGTAGCGC GAGAGTTATT CAAGAAGGCA |
| 601 | GTAGGAGTAC TAGAGGAGAG TGTCTATAAA ATTCTGTTTA AGAGCTATAG |
| 651 | AGATGCGTTT TATGAATGTG AGAAGGCAAA GATCCAGAGG GATGGGCGTT |
| 701 | TCAAATGGTT ATAG |

[1158] The PSORT algorithm predicts cytoplasm (0.2817).

[1159] The protein was expressed in E. coli and purified as a his-tagged product (FIG. 149A). The recombinant protein was used to immunise mice, whose sera were used in a Western blot (FIG. 149B) and for FACS analysis.

[1160] These experiments show that cp6264 is a surface-exposed and immunoaccessible protein, and that it is a useful immunogen. These properties are not evident from the sequence alone.

### Example 150

[1161] The following C. pneumoniae protein (PID 4376266) was expressed <SEQ ID 299; cp6266>:

| | |
|---|---|
| 1 | MLLLISGALF LTLGIPGLSA AISFGLGIGL SALGGVLMIS GLLCLLVKRE |
| 51 | IPTVRPEEIP EGVSLAPSEE PALQAAQKTL AQLPKELDQL DTDIQEVFAC |
| 101 | LRKLKDSKYE SRSFLNDAKK ELRVFDFVVE DTLSEIFELR QIVAQEGWDL |
| 151 | NFLINGGRSL MMTAESESLD LFHVSKELGY LPSGDVRGEG LKKSAKEIVA |
| 201 | RLMSLHCEIH KVAVAFDRNS YAMAEKAFAK ALGALEESVY RSLTQSYRDK |
| 251 | FLESERAKIP WNGHITWLRD DAKSGCAEKK LGMPRNVGRN LGKQSFG* |

[1162] The cp6266 nucleotide sequence <SEQ ID 300> is:

| | |
|---|---|
| 1 | ATGCTCTTAC TGATTTCAGG AGCTCTCTTT CTGACGTTAG GGATTCCAGG |
| 51 | ATTGAGTGCA GCAATTTCTT TTGGATTAGG CATCGGTCTC TCCGCATTAG |
| 101 | GAGGAGTGCT GATGATTTCG GGACTACTAT GTCTTTTAGT AAAACGAGAG |
| 151 | ATTCCGACAG TACGACCAGA AGAAATTCCT GAAGGGGTTT CGCTGGCTCC |
| 201 | TTCTGAGGAG CCAGCTCTAC AGGCAGCTCA GAAGACTTTA GCTCAGCTGC |
| 251 | CTAAGGAATT GGATCAGTTA GATACAGATA TTCAGGAAGT GTTCGCATGT |
| 301 | TTAAGAAAGC TGAAACATTC TAAGTATGAA AGTCGAAGTT TTTTAAACGA |
| 351 | TGCTAAGAAG GAGCTTCGAG TTTTTCACTT TGTGGTTGAG GATACCCTCT |
| 401 | CGGAGATTTT CGAGTTGCGG CAGATTGTGG CTCAAGAGGG ATGGGATTTA |
| 451 | AACTTTTTGA TCAATGGGGG ACGAAGCCTC ATGATGACTG CAGAATCTGA |
| 501 | ATCGCTTGAT TTGTTTCATG TATCGAAGCG GCTAGGGTAT TTACCTTCTG |
| 551 | GGGATGTTCG AGGGGAGGGG TTAAAGAAAT CTGCGAAGGA GATAGTCGCT |
| 601 | CGTTTGATGA GCTTGCATTG CGAGATTCAC AAGGTGGCGG TAGCGTTTGA |
| 651 | TAGGAATTCC TATGCGATGG CAGAAAAGGC GTTTGCGAAA GCGTTGGGAG |
| 701 | CTTTAGAAGA GAGTGTGTAT CGGAGTCTGA CGCAGAGTTA TAGAGATAAA |
| 751 | TTTTTGGAGA GCGAGAGGGC GAAGATCCCA TGGAATGGGC ATATAACCTG |
| 801 | GTTAAGAGAT GATGCGAAGA GTGGGTGTGC TGAAAAGAAG CTCGGGATGC |
| 851 | CGAGGAACGT TGGAAGAAAT TTAGGAAAGC AGTCTTTTGG GTAG |

[1163] The PSORT algorithm predicts inner membrane (0.3590).

[1164] The protein was expressed in E. coli and purified as a his-tag product (FIG. 150A). The recombinant protein was used to immunise mice, whose sera were used in a Western blot (FIG. 150) and for FACS analysis.

[1165] These experiments show that cp6266 is a surface-exposed and immunoaccessible protein and that they it is a useful immunogen. These properties are not evident from the sequence alone.

### Example 151

[1166] The following C. pneumoniae protein (PID 4376895) was expressed <SEQ ID 301; cp6895>:

| | |
|---|---|
| 1 | MKIKKSFQYS LCQAKRFQNM LPNHFDPCLQ PVNLQLKQDR LAYGELIILL |
| 51 | SKYQQKTFSS LLKEETCSLN RAKQHLLYKI LRDFNTMQHL RSLGLNGWGE |
| 101 | IPMSPCL* |

[1167] The cp6895 nucleotide sequence <SEQ ID 302> is:

| | |
|---|---|
| 1 | ATGAAGATTA AAAAATCTTT TCAATACAGT TTATGCCAAG CAAAGAGATT |
| 51 | TCAGAACATG CTGCCAAACC ACTTTGATCC ATGTTTGCAG CCAGTGAATT |
| 101 | TACAACTCAA ACAAGACAGA TTGGCATACG GGGAGCTCAT CATATTGCTA |
| 151 | TCTAAATATC AACAAAAGAC CTTTTCCTCT TTGTTGAAGG AAGAAACATG |
| 201 | TTCTCTTAAT CGTGCGAAGC AGCACTTATT GTATAAGATT TTGAGAGATT |
| 251 | TTAATAOPAT GCAGCATCTA AGGTCCCTCG GATTAAATGG TTGGGGAGAG |
| 301 | ATCCCTATGA GTCCTTGCCT CTAA |

[1168] The PSORT algorithm predicts cytoplasm (0.3264).

[1169] The protein was expressed in E. coli and purified as a his-tag product (FIG. 151A). The recombinant protein was used to immunise mice, whose sera were used in a Western blot (FIG. 151B) and for FACS analysis.

[1170] These experiments show that cp6895 is a surface-exposed and immunoaccessible protein and that it is a useful immunogen. These properties are not evident from the sequence alone.

### Example 152 and Example 153

[1171] The following C. pneumoniae protein (PID 4376282) was expressed <SEQ ID 303; cp6282>:

| | |
|---|---|
| 1 | MSLLNLPSSQ DSASEDSTSQ SQIFDPIRNR ELVSTPEEKV RQRLLSFLMH |
| 51 | KLNYPKKLII IEKELKTLFP LLMRKGTLIP KRRPDILIIT PPTYTDAQGN |
| 101 | THNLGDPRPL LLIECKALAV NQNALKQLLS YNYSIGATCI AMAGKHSQVS |
| 151 | ALFNPKTQTL DFYPGLPEYS QLLNYFISLN L* |

[1172] The cp6282 nucleotide sequence <SEQ ID 304> is:

| | |
|---|---|
| 1 | ATGTCCTTAT TGAACCTTCC CTCAAGCCAG GATTCTGCAT CTGAGGACTC |
| 51 | CACATCGCAA TCTCAAATCT TCGATCCCAT TAGAAATCGG GAGTTAGTTT |
| 101 | CTACTCCCGA AGAAAAAGTC CGCCAAAGGT TGCTCTCCTT CCTAATGCAT |
| 151 | AAGCTGAACT ACCCTAAGAA ACTCATCATC ATAGAAAAAG AACTCAAAAC |
| 201 | TCTTTTTCCT CTGCTTATGC GTAAAGGAAC CCTAATCCCA AAACGCCGCC |
| 251 | CAGATATTCT CATCATCACT CCCCCCACAT ACACAGACGC ACAGGGAAAC |
| 301 | ACTCACAACC TAGGCGACCC AAAACCCCTG CTACTTATCG AATGTAAGGC |
| 351 | CTTAGCCGTA AACCAAAATG CACTCAAACA ACTCCTTAGC TATAACTACT |
| 401 | CTATCGGAGC CACCTGCATT GCTATGGCAG GGAAACACTC TCAAGTGTCA |
| 451 | GCTCTCTTCA ATCCAAAAAC ACAAACTCTT GATTTTTATC CTGGCCTCCC |
| 501 | AGAGTATTCC CAACTCCTAA ACTACTTTAT TTCTTTAAAC TTATAG |

[1173] The PSORT algorithm predicts cytoplasm (0.362).

[1174] The following C. pneumoniae protein (PID 4377373) was also expressed <SEQ ID 305; cp7373>:

| | |
|---|---|
| 1 | MSTTTVKHFI HTASRWEPVL KEIVASNYWH AQWINTLSFL ENSGAKKISA |
| 51 | SEHPTEVKEE VLKHAAEEFR HGHYLKTQIS RISETSLPDY TSKNLLGGLL |
| 101 | TKYYLHLLDL RTCRVLENEY SLSGQTLKTA AYILVTYAIE LHASELYPLY |
| 151 | HDILKEAQSK ITVKSIILEE QGHLQEMERE LKDLPHGEEL LGYACQFEGE |
| 201 | LCLQFVERLE QMIFDPSSTF TKF* |

[1175] The cp7373 nucleotide sequence <SEQ ID 306> is:

| | |
|---|---|
| 1 | ATGTCTACAA CCACAGTAAA ACACTTTATC CACACAGCCT CTCGTTGGGA |
| 51 | GCCCGTTCTC AAAGAGATCG TAGCTTCCAA CTATTGGCAT GCACAATGGA |
| 101 | TAAATACCCT GTCCTTTTTA GAAAATAGTG GAGCAAAAAA AATCTCCGCA |
| 151 | AGTGAACATC CTACGGAGGT AAAGGAAGAA GTTTTAAAAC ATGCTGCTGA |
| 201 | AGAATTTCGT CATGGTCACT ATCTAAAAAC TCAGATTTCT AGAATCTCAG |
| 251 | AGACTTCTCT CCCIGACTAT ACATCTAAAA ATCTTCTGGG AGGCTTACTT |
| 301 | ACAAAATATT ACCTCCATCT TCTAGATWTA AGGACGTGCC GAGTACTGGA |
| 351 | AAATGAATAC TCCCTATCGG GACAAACGTT AAAAACTGCA GCGTATATTT |
| 401 | TAGTTACCTA CGCAATCGAA CTTCGTGCTT CTGAACTTTA TCCTCTGTAT |
| 451 | CACGATATTC TGAAAGAAGC TCAAAGTAAA ATAACGGTAA AATCCATTAT |
| 501 | CTTAGAAGAG CAAGGCCATC TGCAAGAGAT GGAACGTGAA CTTAAAGATC |
| 551 | TCCCCCACGG GGAGGAACTC TTAGGCTATG CTTGCCAATT CGAAGGGGAG |
| 601 | CTTTGCTTGC AGTTTGTAGA GAGATTAGAA CAAATGATCT TCGATCCTTC |
| 651 | CTCGACTTTT ACAAAGTTCT AG |

[1176] The PSORT algorithm predicts cytoplasm (0.1069).

[1177] The proteins were expressed in E. coli and purified as his-tag products (FIG. 152A; 6282 lanes 8 & 9; 7373=lanes 24). The recombinant proteins were used to immunise mice, whose sera were used in Western blots (FIGS. 152B & 153) and for FACS analysis.

[1178] These experiments show that cp6282 & cp7373 are surface-exposed and immunoaccessible proteins and that they are useful immunogens. These properties are not evident from the sequence alone.

### Example 154, Example 155, Example 156, Example 157 and Example 158

[1179] The following C. pneumoniae protein (PID 4376412) was expressed <SEQ ID 307; cp6412>:

| | |
|---|---|
| 1 | MSSSEVVFQT VHGLGFGGLS SKSVVPFKKS LSDAPRVVCS ILVLTLGLGA |
| 51 | LVCGIAITCW CVPGVILMGG ICAIVLGAIS LALSLFWLWG LFSNCCGSKR |
| 101 | VLPGEGLLRD KLLDGGFSRA APSGMGLPGD GSPRASTPSC LEELQAEIQA |
| 151 | VTQAIDQMSD D* |

[1180] The cp6412 nucleotide sequence <SEQ ID 308> is:

| | |
|---|---|
| 1 | ATGAGCAGTT CGGAAGTTGT TTTCCAGACA GTTCATGOCC TTGGCTTTGG |
| 51 | TGGATTGTCT TCAAAAAGTG TTGTCCCTTT TAAGAAAAGT CTTTCGGATG |
| 101 | CGCCCCGTGT TGTGTGCTCG ATTTTAGTTT TGACTCTGGG CTTGGGAGCG |
| 151 | CTTGTTTGTG GTATTGCCAT TACTTGTTGG TGTGTCCCGG GAGTTATTTT |
| 201 | AATGGGGGGA ATTTGCOCTA TAGTTTTAGG TGCAATTTCT TTAGCTTTAA |
| 251 | GTCTATTTTC GTTGTGGGGT TTATTTTCTA ATTGTTGTGG TTCTAAGAGA |
| 301 | GTTTTACCGC GTGAGGGATT GCTACGGGAT AAGCTTTTAG ATGGTGGATT |
| 351 | TTCAAGAGCG GCACCTTCAG GAATGGGACT TCCGGGTGAT GGATCTCCAA |
| 401 | GAGCGTCAAC GCCATCTTGC CTAGAGGAAC TTCAAGCAGA GATACAGGCA |
| 451 | GTTACTCAAG CTATCGATCA GATGTCAGAT GATTGA |

[1181] The PSORT algorithm predicts inner membrane (0.4864).

[1182] The following C. pneumoniae protein (PID 4376431) was also expressed <SEQ ID 309; cp6431>:

| | |
|---|---|
| 1 | LRAGGSLVTT YPKEGQRLRS PEQLRVLDDL VQSYPNHLHA IELDCGAIPQ |
| 51 | DLIGATYIIT FADFSTYILS LRSYQANSPS DDTWGIWFGS IDDPVQAVIS |
| 101 | FLKDHGFALP STLAQDPLLC TNK* |

[1183] The cp6431 nucleotide sequence <SEQ ID 310> is:

| | |
|---|---|
| 1 | TTGCGAGCAG GAGGTAGTCT TGTTACAACA TACCCTAAGG AAGGTCAGAG |
| 51 | ATTGCGCTCC CCAGAACAGT TAAGAGTTCT GGATGATTTA GTGCAAAGCT |
| 101 | ATCCAAATCA CCTACATGCG ATTGAACTTG ATTGTGGTGC AATCCCTCAA |
| 151 | GATTTGATCG GAGCCACCTA TATCATCACG TTCGCCGATT TTTCCACCTA |
| 201 | TATTCTCTCT TTAAGAAGCT ACCAAGCCAA TTCTCCCTCC GATGATACAT |
| 251 | GGGGGATTTG GTTTGGATCT ATTGACGATC CTGTTCAAGC AGTCATATCA |
| 301 | TTTTTAAAAG ATCATGGATT TGCTCTTCCC TCGACCTTAG CTCAAGATCC |
| 351 | TTTGCTTTGT ACTAACAAGT AA |

[1184] The PSORT algorithm predicts cytoplasm (0.2115).

[1185] The following C. pneumoniae protein (PID 4376443) was also expressed <SEQ ID 311; cp6443>:

| | |
|---|---|
| 1 | MIMTTISNSP SPALNPELSL IPPPTLVSSG TQTSLAYTIP AQGRRSTLRI |
| 51 | ILDIFIIILG LATIISTFIV IFFLNGLNLL STPSIISSSC LIIVGLLFLI |
| 101 | MGLYFMISSL DQGLVGLLQK ELSQAEEREE EYIQEIEALR GAPRAESPTE |
| 151 | SPSTWL* |

[1186] The cp6443 nucleotide sequence <SEQ ID 312> is:

| | |
|---|---|
| 1 | ATGATTATGA CTACTATATC TAACTCACCC TCCCCTGCAT TGAATCCCGA |
| 51 | ACTTTCCCTT ATTCCTCCAC CAACACTTGT ATCTTCAGGT ACGCAAACAT |
| 101 | CTCTAGCTTA TACGATCCCC GCACAAGGAC GAAGATCCAC CCTACGTATT |
| 151 | ATATTAGATA TATTCATTAT CATTCTTGGT TTAGCTACGA TCATTTCTAC |
| 201 | CTTTATTGTT ATTTTCTTTT TAAATGGGCT GAACTTGCTC TCGACCCCAT |
| 251 | CTATTATCTC TTCGTCATGT TTAATCATTG TTGGATTGCT TTTTTTGATT |
| 301 | ATGGGGTTAT ATTTCATGAT CTCGAGTTTG GATCAGGGGC TTGTAGGCCT |
| 351 | TCTGCAAAAG GAACTCTCTC AAGCCGAAGA AAGAGAAGAA GAGTATATCC |
| 401 | AGGAAATCGA AGCTTTAAGA GGAGCTCCTA GAGCAGAATC TCCCACAGAG |
| 451 | TCTCCTAGTA CCTGGTTATG A |

[1187] The PSORT algorithm predicts inner membrane (0.5585).

[1188] The following C. pneumoniae protein (PID 4376496) was also expressed <SEQ ID 313; cp6496>:

| | |
|---|---|
| 1 | MLIGRYSSDD QFTEATKNTP TIIKLGFVRD NLEGTNPIS EIVSETSSSI |
| 51 | KDSVLRSLPI LGSILGCARL YSTLSTNDPL DETQEKIWHT IFGALETLGL |
| 101 | GILILLFKII FVILHCIFHL VIGFCK* |

[1189] The cp6496 nucleotide sequence <SEQ ID 314> is:

| | |
|---|---|
| 1 | ATGCTAATAG GCAGATACAG TAGTGATGAC CAATTCACTG AAGCAACAAA |
| 51 | AAACACCCCA ACCATAATTA AGCTAGGTTT TGTTAGAGAT AATCTCGAGG |
| 101 | GATTAACGAA CCCTATCTCT GAAATCGTCT CGGAAACCTC CTCTTCTATT |
| 151 | AAAGATTCCG TTCTTCGCTC TCTTCCTATT TTAGGGPCCA TTTTAGGATG |
| 201 | CGCCCGACTT TACAGCACAC TCTCTACAAA TGATCCTCTT GACGAAACTC |
| 251 | AAGAAAAGAT TTGGCACACT ATATTTGGAG CCTTAGAAAC CTTAGGCTTA |
| 301 | GGGATTCTCA TCCTCTTATT TAAAATTATT TTTGTTATAT TACACTGCAT |
| 351 | ATTTCATCTA GTTATTGGGT TCTGCAAATA A |

[1190] The PSORT algorithm predicts inner membrane (0.5989).

[1191] The following C. pneumoniae protein (PID 4376654) was also expressed <SEQ ID 315; cp6654>:

| | |
|---|---|
| 1 | MKTKMNSRKK AGQWAIFNSP TPGVSSTLVL AWTPWGYYDK DVQDILERKD |
| 51 | PMSSSLSEKD SKEFLKNLFV DLLENGFTSV HIHAEEAFTP LDHTGKPHFK |
| 101 | RDNVYLPGKL LGALNEAAVQ ANVSADTQFT LFLTQDECNP FHDKKRG* |

[1192] The cp6654 nucleotide sequence <SEQ ID 316> is:

| | |
|---|---|
| 1 | ATGAAAACTA AAATGAACTC TAGAAAAAAA GCAGGTCAAT GGGCAATTTT |
| 51 | CAATTCTCCA ACTCCTGGTG TCAGTTCAAC TTTAGTTTTA GCATGCACTC |
| 101 | CTTGGGGTTA TTACGACAAG GATGTACAAG ATATCTTAGA AAGAAAAGAT |
| 151 | CCGATGAGCT CTTCGCTTTC TGAAAAAGAC TCAAAGGAGT TCTTGAAAAA |
| 201 | TCTGTTTGTA GATCTCTTAG AAAATGGCTT CACATCAGTA CATATTCACG |
| 251 | CAGAAGAAGC TTTCACTCCT CTTGATCATA CCGGGAAACC TCACTTTAAA |
| 301 | AGAGACAATG TGTACTTACC CGGAAAGTTG TTAGGCGCCT TGAATGAGGC |
| 351 | TGCGGTACAA GCCAATGTAA GTGCGGATAC TCAATTTACA TTGTTCCTTA |
| 401 | CTCAAGATGA GTGCAATCCT TTTCATGATA AGAAAAGAGG TTAA |

[1193] The PSORT algorithm predicts cytoplasm (0.0730).

[1194] The proteins were expressed in E. coli and purified as his-tag products (FIG. 154A; 6412 lanes 2-3; 6431=lanes 11-12; 6443=lanes 5-6; 6496=lanes 8-9; 6654=lane 10; markers in lanes 1, 4, 7). The recombinant proteins were used to immunise mice, whose sera were used in Western blots (FIGS. 154B, 155, 156, 157 & 158) and for FACS analysis.

[1195] These experiments show that cp6412, cp6431, cp6443, cp6496 & cp6654 are surface-exposed and immunoaccessible proteins and that they are useful immunogens. These properties are not evident from their sequences alone.

### Example 159 and Example 160

[1196] The following C. pneumoniae protein (PID 4376477) was expressed <SEQ ID 317; cp6477>:

| | |
|---|---|
| 1 | LLKFFLVCEE LCILTVATHR ALLETPLALS FFKELKTKYV YRAKDILQLH |
| 51 | NYKGFTILNT SPLCS* |

[1197] The cp6477 nucleotide sequence <SEQ ID 318> is:

| | |
|---|---|
| 1 | TTGCTAAAGT TCTTTCTAGT ATGTGAAGAG TTATGTATAC TTACTGTTGC |
| 51 | TACACATAGA GCTCTCTTAG AAACTCCTTT AGCTCTATCA TTTTTTAAAG |
| 101 | AACTTAAGAC AAAATATGTC TACAGGGCGA AAGACATACT ACAACTACAT |
| 151 | AACTATAAAG GATTTACTAT CCTTAATACA TCACCGTTAT GTTCTTAA |

[1198] The PSORT algorithm predicts inner membrane (0.128).

[1199] The following C. pneumoniae protein (PID 4376435) was also expressed <SEQ ID 319; cp6435>:

| | |
|---|---|
| 1 | LWSHFPRGFF MLPFCPTILL AKPFLNSENY GLERLAATVD |

SYFDLGQSQI

| | |
|---|---|
| 51 | VFLSKQDQGI TVEELSAKDR KPKPGSMNCT LYTEDPILPA |

HNSPSNCSDI

| | |
|---|---|
| 101 | QMRTPISPIH * |

[1200] The cp6435 nucleotide sequence <SEQ ID 320> is:

| | |
|---|---|
| 1 | TTGTGGTCGC ATTTCCCAAG AGGATTTTTT ATGCTCCCTT |

TTTGCCCTAC

| | |
|---|---|
| 51 | CATCCTTCTT GCTAAACCTT TTTTAAATAG CGAGAATTAC |

GGCTTAGAAC

| | |
|---|---|
| 101 | GTTTAGCTGC AACCGTAGAT TCTTATTTTG ATCTGGGACA |

GTCTCAAATA

| | |
|---|---|
| 151 | GTCTTCCTAA GCAAACAGGA TCAAGGAATC ACTGTGGAAG |

AATTGAGTGC

| | |
|---|---|
| 201 | TAAAGATAGG AAATTCAAGC CAGGCTCTAT GAACTGTACA |

CTGTACACTG

| | |
|---|---|
| 251 | AAGATCCTAT CTTACCTGCT CATAATTCCT TTAGTAATTG |

CTCTGATATT

| | |
|---|---|
| 301 | CAAATGCGTA CTCCGATTAG CCCTATACAT TAA |

[1201] The PSORT algorithm predicts periplasmic space (0.4044).

[1202] The proteins were expressed in E. coli and purified as his-tag products (FIG. 159A; 6435 lanes 2-4; 6477=lanes 5-7). The recombinant proteins were used to immunise mice, whose sera were used in Western blots (FIGS. 159B & 160) and for FACS analysis.

[1203] These experiments show that cp6477 & cp6435 are surface-exposed and immunoaccessible proteins and that they are useful immunogens. These properties are not evident from the sequences alone.

### Example 161 and Example 162 and Example 163

[1204] The following C. pneumoniae protein (PID 4376441) was expressed <SEQ ID 321; cp6441>:

| | |
|---|---|
| 1 | VEAGANVLVI DTAHAHSKGV FQTVLEIKSQ FPQKSLVVGN |

LVTAEAAVSL

| | |
|---|---|
| 51 | AEIGVDAVKV GIGPGSICTT RIVSGVGYPQ ITAITNVAKA |

LKNSAVTVIA

| | |
|---|---|
| 101 | DGRIRYSGDV VKALAAGADC VMLGSLLAGT DEAPGDIVSI |

DEKLFKRYRG

| | |
|---|---|
| 151 | MGSLGAMKQG SADRYFQTQG QKRLVPGGVE QLVAYKGSVH |

DVLYQILGGI

| | |
|---|---|
| 201 | RSGMGYVGAE TLKDLKTKAS PVRKTESGRA ESHIHNIYKV |

QPTLNY

[1205] The cp6441 nucleotide sequence <SEQ ID 322> is:

| | |
|---|---|
| 1 | GTGGAAGCTG GAGCAAATGT TCTAGTCATT GACACAGCTC |

ATGCACACTC

| | |
|---|---|
| 51 | TAAAQGAGTA TTCCAAACAG TTTTAGAAAT AAAATCCCAG |

TTCCCACAAA

| | |
|---|---|
| 101 | TTTCTTTAGT TGTAGGGAAT CTTGTTACAG CTGAAGCCGC |

AGTTTCCTTA

| | |
|---|---|
| 151 | GCTGAGATTG GAGTTGACGC TGTAAAGGTA GGTATTGGCC |

CAGGATCTAT

| | |
|---|---|
| 201 | CTGTACAACT AGAATCGTTT CAGGGGTCGG TTATCCACAA |

ATTACTGCCA

| | |
|---|---|
| 251 | TTACAAACGT AGCAAAAGCT CTTAAAAACT CTGCCGTGAC |

TGTAATTGCT

| | |
|---|---|
| 301 | GATGGGAGAA TCCGCTATTC TGGAGATGTG GTAAAAGCAT |

TAGCAGCACG

| | |
|---|---|
| 351 | AGCAGACTGT GTCATGCTAG GAAGTTTGCT TGCAGGGACT |

GATGAAGCTC

| | |
|---|---|
| 401 | CTGGGGATAT CGTTTCTATC GATGAGAAGC TTTTTAAAAG |

GTACCGCGGC

| | |
|---|---|
| 451 | ATGGGATCTT TAGGCGCTAT GAAACAAGGA AGTGCTGACC |

GGTATTTTCA

| | |
|---|---|
| 501 | AACACAGGGA CAGAAAAAGC TGGTTCCTGG GGGAGTTGAA |

GGACCGCTCG

| | |
|---|---|
| 551 | CTTATAAAGG CTCTGTCCAC GATGTCCTCT ATCAAATTTT |

AGGAGGAATA

| | |
|---|---|
| 601 | CGCTCAGGTA TGGGGTATGT TGGAGCTGAA ACTCTCAAAG |

ATTTAAAAAC

| | |
|---|---|
| 651 | TAAGGCTTCC TTTGTTCGAA TTACTGAATC TGGAAGAGCT |

GAAAGTCATA

| | |
|---|---|
| 701 | TTCATAATAT TTACAAAGTT CAACCAACCT TAAATTATTA |

A

[1206] The PSORT algorithm predicts bacterial inner membrane (0.132).

[1207] The following C. pneumoniae protein (PID 4376748) was also expressed <SEQ ID 323; cp6748>:

| | |
|---|---|
| 1 | LFSEGTALNL FRIFAPLRNR VTTEYSRARQ PDLHRIAIVY |

IGVLDSESSK

| | |
|---|---|
| 51 | ILERLISYMS CIYSESQMYL RFFMGKNVNQ SAVLSKLHVE |

NLHIRCGFFS

| | |
|---|---|
| 101 | EDAVPESEPF DLSIYVHTDR SCPLPTKKRS SSWELQTVEL |

PESIYPQSEF

| | |
|---|---|
| 151 | LLMRORMLS* |

[1208] The cp6748 nucleotide sequence <SEQ ID 324> is:

| | |
|---|---|
| 1 | TTGTTCTCTG AGGGGACAGC TCTAAATTTA TTTCGTATAT |

TTGCTCCACT

| | |
|---|---|
| 51 | ACGCAACCGT GTGACThCAG AATACAGTCG TGCTAGGCAA |

CCCGACCTAC

| | |
|---|---|
| 101 | ATAGAATTGC CATCGTCTAT ATAGGAGTTC TCGATTCAGA |

AAGTTCCAAG

| | |
|---|---|
| 151 | ATCCTAGAGC GGCTAATCTC TTATATGAGT TGTATCTATT |

CTGAATCGCA

| | |
|---|---|
| 201 | AATGTATTTA AGATTCTTTA TGGGCAAGAA TGTAAATCAA |

AGTGCTGTAC

| | |
|---|---|
| 251 | TCTCAAAATT ACATGTAGAA AATCTGCACA TCCGTTGTGG |

CTTTTTCAGC

| | |
|---|---|
| 301 | GAGGATGCTG TTCCAGAGAG TGAGCCCTTC GATCTCTCCA |

TCTACGTGCA

| | |
|---|---|
| 351 | CACAGATCGT AGCTGTCCTC TCCCTACGAA AAAACGGAGC |

AGCTCCTGGG

| | |
|---|---|
| 401 | AACTCCAAAC TGTAGAACTC CCAGAGTCAA TATATCCACA |

GTCGGAATTC

| | |
|---|---|
| 451 | CTATTGATGA GACCTCGAAT GCTTTCGTAG |

[1209] The PSORT algorithm predicts cytoplasm (0.170).

[1210] The following C. pneumoniae protein (PID 4376881) was also expressed <SEQ ID 325; cp6881>:

| | |
|---|---|
| 1 | MRPHRKHVSS KSLALKQSAS THVEITTKAF RLSMPLKQLI |

LEKSDHLPPM

| | |
|---|---|
| 51 | ETIRVVLTSH KDKLGTBVHV VASHGKEILQ TKVHNANPYT |

AVINAFKKIR

| | |
|---|---|
| 101 | TMANKHSNKR KDRTKHDLGL AAKEERIAIQ EEQEDRLSNE |

WLPVEGLDAW

| | |
|---|---|
| 151 | DSLKTLGYVP ASAKKKISKK KMSIRMLSQD EAIRQLESAA |

ENFLIFLNEQ

| | |
|---|---|
| 201 | EHRIQCIYKR HDGNYVLIEP SLKPGFCI* |

[1211] The cp6881 nucleotide sequence <SEQ ID 326> is:

| | |
|---|---|
| 1 | ATGAGACCTC ATCGTAAACA CGTATCATCT AAAAGCTTAG |

CTTTAAAGCA

| | |
|---|---|
| 51 | ATCTGCATCA ACTCATGTAG AGATCACAAC AAAAGCCTTT |

CGTCTCTCTA

| | |
|---|---|
| 101 | TGCCTCTAAA ACAGCTGATC CTAGAGAAAA GCGACCACCT |

CCCCCCTATG

| | |
|---|---|
| 151 | GAAACAATCC GTGTGGTGCT AACCTCTCAT AAAGATAAGC |

TAGGCACCGA

| | |
|---|---|
| 201 | GGTGCATGTT GTAGCTTCTC ATGGCAAAGA AATCCTTCAA |

ACTAAGCTTC

| | |
|---|---|
| 251 | ATAACGCAAA CCCATACACT GCAGTGATCA ATGCTTTTAA |

GAAAATCCGC

| | |
|---|---|
| 301 | ACCATGGCAA ATAAGCACTC CAATAAACGT AAAGACAGGA |

CAAAACATGA

| | |
|---|---|
| 351 | TCTAGGTCTT GCAGCAAAAG AAGAACGTAT CGCAATACAG |

GAAGAACAAG

| | |
|---|---|
| 401 | AAGATCGCCT TAGCAACGAG TGGCTTCCTG TCGAAGGCCT |

CGATGCCTGG

| | |
|---|---|
| 451 | GATTCTCTAA AAACTCTTGG GTATGTTCCC GCATCAGCGA |

AAAAGAAGAT

| | |
|---|---|
| 501 | CTCCAAGAAA AAGATGAGCA TTCGTATGCT ATCTCAAGAC |

GAGGCTATCC

| | |
|---|---|
| 551 | GCCAGCTAGA GTCTGCCGCA GAAAACTTCC TGATCTTCTT |

GAACGAGCAA

| | |
|---|---|
| 601 | GAGCATAAAA TCCAATGCAT TTATAAAAAA CATGACGGCA |

ACTATGTCCT

| | |
|---|---|
| 651 | TATTGAACCT TCCCTCAAGC CAGGATTCTG CATCTGA |

[1212] The PSORT algorithm predicts cytoplasm (0.249).

[1213] The proteins were expressed in E. coli and purified as his-tag products (FIG. 161A; 6441=lanes 7-9; 6748=lanes 2-3; 6881=lanes 4-6). The recombinant protein was used to immunise mice, whose sera were used in Western blots (FIGS. 161B, 162 & 163) and for FACS analysis.

[1214] These experiments show that cp6441, cp6748 & cp6881 are surface-exposed and immunoaccessible proteins and that they are useful immunogens. These properties are not evident from the sequence alone.

### Example 164 and Example 165 Example 166

[1215] The following C. pneumoniae protein (PID 4376444) was expressed <SEQ ID 327; cp6444>:

| | |
|---|---|
| 1 | MEQPNCVKQD TTTVLYALNS FDPRLSDDTH RLGKQSPLEA |

ENALGEFIEG

| | |
|---|---|
| 51 | LDTNSFPLEE VAIPILPGYH PKFYLSFIDR DDQGVHYEVL |

DGVFLKTVAA

| | |
|---|---|
| 101 | CIIENSFLTD SHSPELLSEV KEALKR* |

[1216] The cp6444 nucleotide sequence <SEQ ID 328> is:

| | |
|---|---|
| 1 | ATGGAGCAAC CCAATTGTGT GATTCAGGAT ACTACAACTG |

TTTTGTATGC

| | |
|---|---|
| 51 | CTTAAATAGC TTTGATCCTA GACTTAGTQA TGACACTCAC |

AGACTTGGGA

| | |
|---|---|
| 101 | AGCAATCACC TCTTGAAGCA GAAAATGCTC TTGGAGAATT |

TATTGAAGGT

| | |
|---|---|
| 151 | TTGGATACAA ATAGCTTTCC TTTAGAGGAA GTTGCCATTC |

CCATCCTGCC

| | |
|---|---|
| 201 | AGGTTATCAC CCTAAGTTTT ATTTATCTTT CATAGATAGG |

GACGATCAAG

| | |
|---|---|
| 251 | GTGTCCACTA TGAAGTTTTA GATGGCGTAT TTTTAAAGAC |

AGTCGCTGCT

| | |
|---|---|
| 301 | TGTATTATAG AGAACTCCTT CTTAACTGAT TCTATGAGCC |

CGGAGCTTCT

| | |
|---|---|
| 351 | CAGCGAAGTT AAGGAAGCTC TGAAACGATG A |

[1217] The PSORT algorithm predicts cytoplasm (0.2031).

[1218] The following C. pneumoniae protein (PID 4376413) was also expressed <SEQ ID 329; cp6413>:

| | |
|---|---|
| 1 | MAVQSIKEAV TSAATSVGCV NCSREAIPAF NTEERATSIA |

RSVIAAIIAV

| | |
|---|---|
| 51 | VAISLLGLGL VVLAGCCPLG MAAGAITMLL GVALLAWAIL |

ITLRLLNIPK

| | |
|---|---|
| 101 | ABIPSPGNNG EPNBRNSATP PLBGGVAGEA GRGGGSPLTQ |

LDLNSGAGS*

[1219] The cp6413 nucleotide sequence <SEQ ID 330> is:

| | |
|---|---|
| 1 | ATGGCTGTTC AATCTATAAA AGAAGCCGTA ACATCAGCCG |

CAACATCAGT

| | |
|---|---|
| 51 | AGGATGTGTA AACTGTTCTA GAGAGGCTAT ACCAGCATTT |

AATACAGAGG

| | |
|---|---|
| 101 | AGAGAGCAAC GAGTATTGCT AGATCTGTTA TAGCAGCTAT |

CATTGCTGTT

| | |
|---|---|
| 151 | GTAGCTATCT CCTTACTCGG ACTAGGTCTT GTAGTTCTTG |

CTGGTTGCTG

| | |
|---|---|
| 201 | TCCTTPAGGA ATGGCTGCGG GTGCTATAAC AATCCTGCTG |

GGTGTAGCAT

| | |
|---|---|
| 251 | TATTAGCTTG GGCAATACTG ATTACTTTGA GACTGCTTAA |

TATACCTAAG

| | |
|---|---|
| 301 | GCTGAAATAC CGAGTCCAGG GAACAACGGT GAGCCTAATG |

AAAGAAATTC

| | |
|---|---|
| 351 | AGCAACTCCT CCTCTAGAGG GTGGTGTTGC AGGAGAAGCC |

GGTCGCGGCG

| | |
|---|---|
| 401 | GGGGGTCACC TTTAACCCAA CTTGATCTCA ATTCAGGGGC |

GGGAAGTTAG

[1220] The PSORT algorithm predicts inner membrane (0.6180).

[1221] The following C. pneumoniae protein (PID 4377391) was also expressed <SEQ ID 331; cp7391>:

| | |
|---|---|
| 1 | NNLRVIELPL LPIKQALEKA PVQYNSYKAR LTKVEPCFRE |

SPAYITSEER

| | |
|---|---|
| 51 | LQSLDQTLER AYKEYQKRFQ EPSRLESEVS GCREHLREQV |

KQFETQGLDL

| | |
|---|---|
| 101 | IKGELIFVSD VLFRKMVSCL VSTVHVPFMB FYYEYFELHR |

LRLRAQWMAN

| | |
|---|---|
| 151 | AEIYSKVRKA FPEMLKETLE KAKAPREEGY WLLCEEGRSR |

EKRLILNKIE

| | |
|---|---|
| 201 | AAQQRVKDLE PPPIKETGKQ REKKEYSFFI RLKS* |

[1222] The cp7391 nucleotide sequence <SEQ ID 332> is:

| | |
|---|---|
| 1 | ATGATGCTTC GTGTCATAGA GCTTCCACTA CTTCCTATAA |

AGCAAGCGTT

| | |
|---|---|
| 51 | GGAGAAGGCT TTTGTACAAT ATAATAQCTA CAAAGCGAAG |

TTAACCAAGG

| | |
|---|---|
| 101 | TAGAACCTTG CTTTAGAGAG AGCCCTGCCT ATATAACTAG |

CGAAGAGCGA

| | |
|---|---|
| 151 | CTCCAGAGTT TGGATCAGAC TTTAGAACGT GCGTACAAAQ |

AGTACCAGAA

| | |
|---|---|
| 201 | GAGATTCCAG GAGCCTTCAC GTTTGGAATC GGAAGTAAGT |

GGATGTAGAG

| | |
|---|---|
| 251 | AGCATCTTAG AGAGCAGGTA AAACAATTTG AAACTCAAGG |

ACTAGACTTG

| | |
|---|---|
| 301 | ATCAAAGAAG AGCTTATTTT TGTTAGTGAT GTGTGATTCC |

GAAAAGTGGT

| | |
|---|---|
| 351 | CAGTTGTCTA GTGTCGACAG TGCATGTTCC CTTTATGGAG |

TTTTATTATG

| | |
|---|---|
| 401 | AGTATTTTGA GTTGCATAGA TTGAGGTTGC GGGCCCAATG |

GATGGCGAGT

| | |
|---|---|
| 451 | GCCGAGATTT ATAGCAAAGT TAGAAAAGCA TTCCCAGAGA |

TGTTGAAGGA

| | |
|---|---|
| 501 | GACCTTAGAA AAAGCTAAGG CTCCCAGAGA AGAAGAGTAT |

TGGTTACTTT

| | |
|---|---|
| 551 | GCGAGGAGAC AAAGAGTAAG GAGAAGCGTT TGATTCTCAA |

CAAGATAGAG

| | |
|---|---|
| 601 | GCAGCTCAGC AGCGGGTAAA AGATTTAGAA CCTCCTCCTA |

TTAAAGAGAC

| | |
|---|---|
| 651 | AGGGAAACAG AAACGGAAGA AAGAATATTC GTTTTTCATT |

CGATTAAAAT

| | |
|---|---|
| 701 | CGTGA |

[1223] The PSORT algorithm predicts inner membrane (0.1489).

[1224] The proteins were expressed inE. coli and purified as his-tag and GST-fusion products (FIG. 164A; 6444-lanes 11-12; 7391=lanes 2-3; 6413=lanes 4-6). The recombinant protein was used to immunise mice, whose sera were used in Western blots (FIGS. 164B, 165 & 166) and for FACS analysis.

[1225] These experiments show that cp6444, cp6413 & cp7391 are surface-exposed and immunoaccessible proteins and that they are useful immunogens. These properties are not evident from the sequence alone.

### Example 167, Example 168, Example 169 and Example 170

[1226] The following C. pneumoniae protein (PID 4376463) was expressed <SEQ ID 333; cp6463>:

| | |
|---|---|
| 1 | MKKKVTIDEA LKEILRLEGA ATQEELCAKL LAQGFATTQS |

SVSRWLRKIQ

| | |
|---|---|
| 51 | AVKVAGERGA RYSLPSSTEK TTTRHLVLSI RHNASLIVIR |

TVPGSASWIA

| | |
|---|---|
| 101 | ALLDGGLKDE ILGTLAGDDT IFVTPIDEGR LPLLMVSIAN |

LLGVPLD*

[1227] The cp6463 nucleotide sequence <SEQ ID 334> is:

| | |
|---|---|
| 1 | ATGAAAAAAA AAGTAACTAT AGATGAGGCT TTAAAAGAAA |

TTTTACGTCT

| | |
|---|---|
| 51 | TGAAGGAGCG GCAACTCAGG AGGAATTATG TGCAAAACTC |

TTAGCTCAAG

| | |
|---|---|
| 101 | GTTTTGCTAC AACCCAGTCG TCTGTATCTC GTTGGCTACG |

AAAGATTCAG

| | |
|---|---|
| 151 | GCTGTAAAGG TTGCTGGAGA GCGTGGTGCT CGTTATTCTT |

TACCCTCTTC

| | |
|---|---|
| 201 | AACAGAGAAG ACCACGACCC GTCATTTGGT GCTCTCTATT |

CGCCATAACG

| | |
|---|---|
| 251 | CCTCTCTTAT TGTAATTCGT ACGGTTCCTG GTTCAGCTTC |

TTGGATCGCT

| | |
|---|---|
| 301 | GCTTTGTTAG ATCAAGGGCT CAAAGATGAA ATTCTTGGAA |

CTTTGGCAGG

| | |
|---|---|
| 351 | AGATGACACG ATTTTTGTCA CTCCTATAGA TGAAGGGAGG |

CTCCCATTGT

| | |
|---|---|
| 401 | TGATGGTTTC GATTGCAAAT TTACTGCAAG TTTTCTTGGA |

TTAA

[1228] The PSORT algorithm predicts inner membrane (0.1510).

[1229] The following C. pneumoniae protein (PID 4376540) was also expressed <SEQ ID 335; cp6540>:

| | |
|---|---|
| 1 | MSGCGSSSTS TWEWMKSFVP NWRNPTPPLS PIPSEDRFIL |

AYEPFVLPKT

| | |
|---|---|
| 51 | DPENAGGNPP GTSTPNVENG IDDLNPLLGG PNEGNNANNP |

GTSGSNPTSL

| | |
|---|---|
| 101 | PAPERLPGTE ENSGEEEGGS GNNEDLIG* |

[1230] The cp6540 nucleotide sequence <SEQ ID 336> is:

| | |
|---|---|
| 1 | ATGTCTCAAT GTCAGAGTAG CAGTACATCT ACCTGGGAAT |

GGATGAAATC

| | |
|---|---|
| 51 | TTTTGTGCCA AACTGGAAGA ATCCAACTCC CCCCTTATCT |

CCTATACCTT

| | |
|---|---|
| 101 | CTGAGGACGA ATTTATATTA GCATACGAGC CATTTGTTCT |

ACCGAAAACA

| | |
|---|---|
| 151 | GATCCAGAAA ACGCACAAGC TAATCCTCCA GGCACATCTA |

CACCGAATGT

| | |
|---|---|
| 201 | AGAAAACGGG ATCGATGATC TCAACCCTCT TCTGGGGCAA |

CCCAACGAAC

| | |
|---|---|
| 251 | AAAACAATGC CAACAATCCA GGAACTTCTG GATCTAATCC |

TACATCTCTA

| | |
|---|---|
| 301 | CCCGCCCCCG AACGACTCCC TGAAACTGAA GAGAACAGCC |

AAGAAGAAGA

| | |
|---|---|
| 351 | ACAAGGATCT CAAAATAATG AGGATCGGAT AGGATAA |

[1231] The PSORT algorithm predicts cytoplasm (0.3086).

[1232] The following C. pneumoniae protein (PID 4376743) was also expressed <SEQ ID 337; cp6743>:

| | |
|---|---|
| 1 | LREEGSVSFR EYPRAYMCDK IVAGKNFLFT LDAVIKGAGW |

RSGEKLNLFY

| | |
|---|---|
| 51 | VESGALGREI KVSLEEYIQS MVGILGSGRT KKSFKFSVDP |

TPLGGALGER

| | |
|---|---|
| 101 | CSSDDDGDAT ATSTATGGTA SPTDMHEDE* |

[1233] The cp6743 nucleotide sequence <SEQ ID 338> is:

| | |
|---|---|
| 1 | TTGAGAGAAG AAGGTAGTGT TTCTTTCAGA GAATATTTCA |

GAGCCTATAT

| | |
|---|---|
| 51 | GTGTGATAAA ATCGTGGCAC ACAAGAACTT CTTATGTACT |

TTAGACGCTG

| | |
|---|---|
| 101 | TAATTAAACA GGCCGGTTGG AGATCACAAG AGAAACTCAA |

TTTATTTTAT

| | |
|---|---|
| 151 | GTTGAAAGTC AGGCTTTAGG AAGAGAAATC AAAGTCAGCT |

TAGAGGAATA

| | |
|---|---|
| 201 | TATTCAGAGT ATGGTCGGGA TTTTGGGATC TCAGAGAACC |

AAGAAAAGCT

| | |
|---|---|
| 251 | TTAAGTTTTC TGTCGACTTT ACCCCTTTAG AGCAGGCTCT |

ACAAGAAAGA

| | |
|---|---|
| 301 | TGCTCTTCTG ATGATGACGA AGATGCAACA GCAACTTCGA |

CCGCTACAGG

| | |
|---|---|
| 351 | GGCAACAGCA TCTCCGACTG ACATGCACGA AGATGAGTAA |

[1234] The PSORT algorithm predicts cytoplasm (0.2769).

[1235] The following C. pneumoniae protein (PID 4377041) was also expressed <SEQ ID 339; cp7041>:

| | |
|---|---|
| 1 | MLMMLMMIIG ITGGSGAGKT TLTQNIKEIF GEDVSVICQD NYYKDRSHYT |
| 51 | PEERANLIWD HPDAFNDDLL ISDIKRLKNN EIVQAPVFDF VLGNRSKTEI |
| 101 | ETIYPSXVIL VEGILVFENQ ELRDLMDIRI FVDTDADERI LRRMVRDVQE |
| 151 | QGDSVDCIMS RYLSMVKPMH EKFIEPTRKY ADIIVHGNYR QNVVTNILSQ |
| 201 | KIKNHLENAL ESDETYYMVN SK* |

[1236] The cp7041 nucleotide sequence <SEQ ID 340> is:

| | |
|---|---|
| 1 | ATGTTGATGA TGCTTATGAT GATTATTGGA ATTACAGOAG GTTCTGGAGC |
| 51 | TGGGAAAACC ACCCTAACCC AAAACATTAA AGAAATTTTC GGTGAGGATG |
| 101 | TGAGTGTTAT CTGCCAAGAT AATTATTACA AAGATAGAPC TCATTATACT |
| 151 | CCTGAAGAAC GTGCCAATTT AATTTGGGAT CATCCGGACG CCTTTGATAA |
| 201 | TGACTTATTA ATTTCAGACA TAAAACGTCT AAAAAATAAT GAGATTGTCC |
| 251 | AAGCCCCAGT TTTTGATTTT GTPTTAGGTA ATCGATCTAA AACGGAGATA |
| 301 | GAAACGATCT ATCCATCTAA AGTTATTCTT GTTGAAGGTA TTCTGGTCTT |
| 351 | TGAAAATCAA GAACTTAGAG ATCTTATGGA TATTAGGATC TTTGTAGACA |
| 401 | CCGATGCTGA TGAAAGGATA CTACGCCGTA TGGTTCGAGA TGTTCAAGAA |
| 451 | CAAGGAGATA GCGTGGACTG CATCATGTCT CGTTATCTTT CTATGGTAAA |
| 501 | GCCTATGCAT GAGAAATTTA TAGAGCCGAC TCGGAAATAT GCTGATATCA |
| 551 | TTGTACATGG AAATTACCGA CAAAACGTAG TAACAAATAT TTTGTCACAG |
| 601 | AAAATTAAAA ATCATTTAGA GAATGCCCTG GAAAGCGATG AGACGTATTA |
| 651 | TATGGTCAAC TCTAAGTAA |

[1237] The PSORT algorithm predicts inner membrane (0.1022).

[1238] The proteins were expressed in E. coli and purified as his-tag products (FIG. 167A; 6463 lanes 2-4; 6540=lanes 5-7; 6743=lanes 8-9; 7041=lanes 10-11). The recombinant proteins were used to immunise mice, whose sera were used in Western blots (FIGS. 167B, 168, 169 & 170) and for FACS analysis.

[1239] These experiments show that cp6463, cp6540, cp6743 & cp7041 are surface-exposed and immunoaccessible proteins and that they are useful immunogens. These properties are not evident from the sequence alone.

### Example 171 and Example 172 and Example 173

[1240] The following C. pneumoniae protein (PID 4376632) was expressed <SEQ ID 341; cp6632>:

| | |
|---|---|
| 1 | VQLFQYNNES GWDWLCDFPS QGEGFQLSRL VGLLHSSWAL YEAKEQFYLP |
| 51 | EVSLLTWEEL IEMQLLSKPT KHGVAKDLCN VPHKHFQRFR QYLGSLDLNQ |
| 101 | RFENTFLNYP KYHLDRE* |

[1241] The cp6632 nucleotide sequence <SEQ ID 342> is:

| | |
|---|---|
| 1 | GTGCAATTAT TTCAATATAT GAATGAGTCC GGATGGGATT GGCTTTGTGA |
| 51 | TTTTGATTCT CAAGGCGAGG GATTCCAGTT ATCACGTCTG GTTGGGCTGT |
| 101 | TACATTCGTC CTGGGCATTA TACGAAGCAA AAGAGCAATT TTACCTTCCT |
| 151 | GAGGTTTCTC TATTGACCTG GGAAGAACTG ATAGAAATGC AGTTATTAAG |
| 201 | CAAACCAACA AAACACGGGG TTGCAAAAGA TCTTTGTAAT GTATTTGAAA |
| 251 | AACACTTTCA AAGGTTTAGA CAGTACCTAG GTTCCTTAGA TCTAAATCAA |
| 301 | AGGTTCGAAA ATACCTTCTT GAATTATCCT AAATACCATT TAGATAGGGA |
| 351 | GTGA |

[1242] The PSORT algorithm predicts cytoplasm (0.3627).

[1243] The following C. pneumoniae protein (PID 4376648) was also expressed <SEQ ID 343; cp6648>:

| | |
|---|---|
| 1 | MPVSSAPLPT SHRPSSGNLG LMEPNSKALK AKHQDKTTKT IKLLVEILVA |
| 51 | ILVIEVLGII AAFFIPGTPP ICLIILGGLI LTPVLCVLLL VIKLALVNKT |
| 101 | EGTTAEQQIK RKLSSKSIS* |

[1244] The cp6648 nucleotide sequence <SEQ ID 344> is:

| | |
|---|---|
| 1 | ATGCCCGTGT CCTCAGCCCC CCTACCCACA AGCCACCGCC CTTCCTCTGG |
| 51 | AAATCTACGC CTCATGGAAC CAAATTCCAA AGCTCTAAAA GCAAAGCATC |
| 101 | AAGATAAAAC GACGAAGACG ATTAAACTTT TAGTTAAAAT CCTTGTTGCC |
| 151 | ATTCTAGTAA TAGAAGTTTT AGGAAThATT GCAGCTTTCT TTATTCCTGG |
| 201 | GACTCCTCCC ATCTGCTTGA TTATCCTAGG AGGCCTTATT CTTACAACAG |
| 251 | TACTCTGTGT GCTTCTTCTT GTTATAAAGC TTGCCCTTGT AAACAAAACC |
| 301 | GAAGGAACAA CTGCTGAACA GCAGATAAAA CGTAAACTCT CTTCTAAAAG |
| 351 | TATTTCTTAG |

[1245] The PSORT algorithm predicts inner membrane (0.6074).

[1246] The following C. pneumoniae protein (PID 4376497) was also expressed <SEQ ID 345; cp6497>:

| | |
|---|---|
| 1 | MRPNSIIFLE NTKHYPDIFR EGEVRDRMGL NEASDWLLST EITIIRSILG |
| 51 | AIPILGNILG AGRLYSVWYT SDEDWRKQVV * |

[1247] The cp6497 nucleotide sequence <SEQ ID 346> is:

| | |
|---|---|
| 1 | ATGAAGCCAA ATAGTATTAT TTTTTTAGAA AATACTAAGC ATTATCCCGA |
| 51 | CATCTTTCGA GAAGGATTTG TTCGTGATCG TCATGGACTA ATGGAAGCCT |
| 101 | CGGATTGGTT ACTTTCTACG GAAATTACGA TCATTCGCTC CATTCTGGGA |
| 151 | GCTATCCCTA TTTTAGGAAA TATTCTTGGA GCCGGACGAC TCTATAGCGT |
| 201 | TTGGTATACA AGTGACGAAG ATTGGAAAAA ACAAGTGGTT TGA |

[1248] The PSORT algorithm predicts inner membrane (0.145).

[1249] The proteins were expressed in E. coli and purified as his-tag products (FIG. 171A; 6632=lanes 5-7; 6648=lanes 8-10; 6497=lanes 2-4). The recombinant proteins were used to immunise mice, whose sera were used in Western blots (FIGS. 171B, 172, 173) and for FACS analysis.

[1250] These experiments show that cp6632, cp6648 and cp6497 are surface-exposed and immunoaccessible proteins and that they are useful immunogens. These properties are not evident from the sequence alone.

### Example 174, Example 175, Example 176, Example 177 and Example 178

[1251] The following C. pneumoniae protein (PID 4377200) was expressed <SEQ ID 347; cp7200>:

| | |
|---|---|
| 1 | MPVPIDNSSR NLQEVPESLE DLBQHAEESP THQSAESSSL QLSLASSAIS |
| 51 | SRVEQLSSLV LGNENSDPSS LRDVPIFSAI YESSTHTPVP TPLVGVGYIN |
| 101 | GSQSGYYDTQ RBSLHLSQLL GSRRVEVVYN QGNFNEASLL NLCPRRPRRD |
| 151 | PSPISLALLE LWEAPFLEHP PGSTFNPIFP W* |

[1252] The cp7200 nucleotide sequence <SEQ ID 348> is:

| | |
|---|---|
| 1 | ATGCCCGTTC CTATAGATAA TTCCTCTCGC AACCTACAAG AAGTTCCAGA |
| 51 | AAGCCTAGAA GACCTCGAAC AACACGCAGA AGAATCTCCT ACTCATCAAA |
| 101 | GTGCAGAAAG CAGTTCTTTG CAACTGTCTC TAGCCTCCTC AGCAATTTCT |
| 151 | AGTAGAGTAG AACAACTATC TTCCCTCGTC TTAGGAATGG AAAATTCAGA |
| 201 | TTTCTCCTCT TTAAGAGACG TTCCTATCTT CTCAGCTATC TACGAATCTT |
| 251 | CAACACACAC ACCTGTCCCC ACTCCTCTAG TTGGCGTGGG ATATATCAAC |
| 301 | GGAAGTCAAT CAGGATACTA CGATACACAA AGAGAATCTC TTCACCTCAG |
| 351 | CCAATTGTTA GGAAGCCGAA GAGTTGAAGT TGTCTATAAC CAAGGAAACT |
| 401 | TCATGGACGC CTCTTTGCTA AATCTGTGCC CCAGAAGACC TCGAAGAGAT |
| 451 | CCCTCTCCAA TTTCTTTAGC TCTATTAGAG CTCTGGGAAG CATTTTTTTT |
| 501 | AGAACACCCC CCAGGTAGCA CTTTTAATCC AATATTTTTT TGGTAA |

[1253] The PSORT algorithm predicts cytoplasm (0.3672).

[1254] The following C. pneumoniae protein (PID 4377235) was also expressed <SEQ ID 349; cp7235>:

| | |
|---|---|
| 1 | LNFVSTLTQS DFYAPVLEKL EEAFADTTGQ VILFSSSPDF |

IVHPIAQQLG

| | |
|---|---|
| 51 | ISSWYASCYR DQSAEQTIYK KCLTGDKKAQ ILSYIKKINQ |

ARSHTFSDHI

| | |
|---|---|
| 101 | LDLPFLMLGE EKTVVRPQGR LKKMAKKYYW NIV* |

[1255] The cp7235 nucleotide sequence <SEQ ID 350> is:

| | |
|---|---|
| 1 | TTGAATTTTG TATCGACTCT GACCGGCTCC GATTTTTATG |

CTCCTGTTTT

| | |
|---|---|
| 51 | AGAAAAACTA GAAGAAGCTT TTGCAGATAC CACAGGACAG |

GTGATCCTTT

| | |
|---|---|
| 101 | TTTCTTCTTC TCCAGACTTT ATTGTCCACC CCATAGCGCA |

GCAACTCGGG

| | |
|---|---|
| 151 | ATTAGTTCTT GGTATGCGTC GTGTTATCGC GATCAGTCTG |

CAGAACAGAC

| | |
|---|---|
| 201 | GATCTATAAA AAATGTCTTA CAGGGGATAA AAAAGCGCAA |

ATTTTGAGTT

| | |
|---|---|
| 251 | ATATTAAAAA AATTAATCAA GCAAGAAGCC ATACCTTCTC |

CGACCATATT

| | |
|---|---|
| 301 | TTAGATCTTC CTTTTCTTAT GCTGGGAGAA GAGAAAACCG |

TCGTTCGCCC

| | |
|---|---|
| 351 | TCAGGGACGA CTCAAGAAAA TGGCAAAAAA ATATTACTGG |

AATATCGTTT

| | |
|---|---|
| 401 | AA |

[1256] The PSORT algorithm predicts cytoplasm (0.3214).

[1257] The following C. pneumoniae protein (PID 4377268) was also expressed <SEQ ID 351; cp7268>:

| | |
|---|---|
| 1 | MMHRYFIPLL ALLIFSPSLV RAELQPSENR KGGWPTQLSC |

AEGSQLFCKF

| | |
|---|---|
| 51 | EAAYNNAIEE GKPGILVFFS ERPTPEFADL TNGSFSLSTP |

IAKGFNVVVL

| | |
|---|---|
| 101 | CPGLISPLDF FHKMDPVILY HGSFLEMFPE VEAVSGPRLC |

YILIDEQGGA

| | |
|---|---|
| 151 | QCQAVLPLET KN* |

[1258] The cp7268 nucleotide sequence <SEQ ID 352> is:

| | |
|---|---|
| 1 | ATGATGCACC GTTATTTTAT TCCTTTATTA GCACTTCTCA |

TTTTCTCTCC

| | |
|---|---|
| 51 | TTCTTTAGTC AGGGCAGAGC TACAACCAAG TGAAAACAGA |

AAAGGGGGGT

| | |
|---|---|
| 101 | GGCCTACACA ACTTTCCTGT GCAGAAGGTT CGCAACTCTT |

CTGTAAATTC

| | |
|---|---|
| 151 | GAAGCTGCCT ATAATAATGC AATTGAGGAA GGGAAACCTG |

GGATTTTAGT

| | |
|---|---|
| 201 | CTTTTTCTCT GAGCGACCCA CACCAGAATT TGCCGACTTA |

ACGAATGGTT

| | |
|---|---|
| 251 | CATTTTCTCT CTCTACGCCA ATCGCCAAGG GCTTTAATGT |

CGTTGTGTTA

| | |
|---|---|
| 301 | TGCCCCGGGC TTATCAGTCC CTTAGACTTT TTCCACAAAA |

TGGATCCTGT

| | |
|---|---|
| 351 | GATTCTCTAT ATGGGAAGTT TTCTAGAGAT GTTCCCTGAA |

GTGGAGGCAG

| | |
|---|---|
| 401 | TTAGTGGCCC TCGCTTATGT TATATCTTAA TAGATGAACA |

GGGTGGGGCT

| | |
|---|---|
| 451 | CAATGTCAGG CTGTCCTGCC TTTAGAAACA AAGAATTAG |

[1259] The PSORT algorithm predicts inner membrane (0.1235).

[1260] The following C. pneumoniae protein (PID 4377375) was also expressed <SEQ ID 353; cp7375>:

| | |
|---|---|
| 1 | MQRIIIVGID TGVGKTIVSA ILARALNAEY WKPIQAGNLE |

NSDSNIVHEL

| | |
|---|---|
| 51 | SGAYCHPEAY RLHKPLSPHK AAQIDNVSIE ESHICAPKTT |

SNLIIETSGG

| | |
|---|---|
| 101 | FLSPCTSKRL QGDVFSSWSC SWILVSQAYL GSINHTCLTV |

EAMRSRNLNI

| | |
|---|---|
| 151 | LGMVVNGYPE DEEHWLTQEI KLPIIGTLAK EKEITKTIIS |

CYAEQWKWVW

| | |
|---|---|
| 201 | TSNHQGIQGV SGTPSLNLH* |

[1261] The cp7375 nucleotide sequence <SEQ ID 354> is:

| | |
|---|---|
| 1 | ATGCAACGTA TCATCATTGT AGGAATCGAC ACTGGCGTAG |

GAAAAACCAT

| | |
|---|---|
| 51 | TGTCAGTGCT ATCCTTGCTA GAGCACTTAA CGCAGAATAC |

TGGAAACCTA

| | |
|---|---|
| 101 | TACAAGCAGG GAATCTAGAA AATTCAGATA GCAATATTGT |

TCATGAGCTA

| | |
|---|---|
| 151 | TCGGGAGCCT ACTGTCATCC CGAAGCTTAT CGATTGCATA |

AGCCCTTGTC

| | |
|---|---|
| 201 | TCCACACAAG GCAGCGCAAA TCGATAATGT AAGTATCGAA |

GAGAGTCATA

| | |
|---|---|
| 251 | TTTGTGCGCC AAAAACAACT TCGAATCTGA TTATTGAGAC |

TTCAGGAGGA

| | |
|---|---|
| 301 | TTTTTATCCC CCTGCACATC AAAAAGACTT CAGGGAGATG |

TGTTTTCTTC

| | |
|---|---|
| 351 | TTGGTCATGT TCTTGGATTT TAGTGAGCCA AGCATATCTC |

GGAAGTATCA

| | |
|---|---|
| 401 | ATCACACCTG TTTAACGGTA GAAGCAATGC GCTCACGAAA |

CCTCAATATC

| | |
|---|---|
| 451 | TTAGGTATGG TGGTAAATGG GTATCCAGAG GACGAAGAGC |

ACTGGCTAAC

| | |
|---|---|
| 501 | TCAAGAAATC AAGCTTCCTA TAATCGGGAC TCTTGCCAAG |

GAAAAAGAAA

| | |
|---|---|
| 551 | TCACAAAGAC AATCATAAGC TGTTATGCCG AACAATGGAA |

GGAAGTATGG

| | |
|---|---|
| 601 | ACAAGCAATC ATCAGGGAAT TCAGGGTGTA TCTGGCACCC |

CTTCACTCAA

| | |
|---|---|
| 651 | TCTGCATTAG |

[1262] The PSORT algorithm predicts cytoplasm (0.0049).

[1263] The following C. pneumoniae protein (PID 4377388) was also expressed <SEQ ID 355; cp7388>:

| | |
|---|---|
| 1 | MQVLLSPQLP PPPQHSVGSI SSPSKLRVLA ITELVFGMLL |

LISGALFLTL

| | |
|---|---|
| 51 | GIPGLSAAIS FGLGIGLSAL GGVLMISGLL CLLVKREIPT |

VRPEEIPEGV

| | |
|---|---|
| 101 | SLAPSEEPAL QAAQKTLAQL PKELDQLDTD IQFVFACLRK |

LKDSKYESRS

| | |
|---|---|
| 151 | FLNDAKKELR VFDFVVEDTL SEIFELRQIV AQEGWDLNFL |

INGGRSLMMT

| | |
|---|---|
| 201 | AESESLDLFH VSKRLGYLPS GDVRGEGLKK SAKEIVARLM |

SLHCEIHKVA

| | |
|---|---|
| 251 | VAFDRNSYAH AEKAFAKALG ALEESVYRSL TQSYRDKFLE |

SERAKIPWNG

| | |
|---|---|
| 301 | HITWLRDDAK SGCAEKKLRD AEERWKKFRK AVFWVEEDGG |

FDINNLLGDW

| | |
|---|---|
| 351 | GTVLDPYRQE RMDEITFHEL YEKTTFLKRL HRKCALAKTT |

FEKKRSKKNL

| | |
|---|---|
| 401 | QAVEEANARR LKYVRDWYDQ EFQKAGERLE KLHALYPEVS |

VSIRENKIQE

| | |
|---|---|
| 451 | TRSNLEKAYE AIEENYRCCV REQEDYWKEE EKREAEFRER |

GNKILSPEEL

| | |
|---|---|
| 501 | ESSLEQFDHG LKNFSEKLME LEGHILKLQK EATAEVENKI |

LSDAESRLEI

| | |
|---|---|
| 551 | VFEDVKEMPC RIEEIEKTLR MAELPLLPTK KAFEKACSQY |

NSCAEMLEKV

| | |
|---|---|
| 601 | KPYCKESLAY VTSKERLVSL DEDLRRAYTE CQKRFQGDSG |

LESEVRACRE

| | |
|---|---|
| 651 | QLRERIQEPE TQGLDLVEKE LLCVSSRLRN TECDCVSGVK |

KEAPPGKKFY

| | |
|---|---|
| 701 | AQYYDEIYRV RVQSRWMTMS ERLEEGVQAC NKMLKAGLSE |

EDKVLKEEEY

| | |
|---|---|
| 751 | WLYREERINK EKRLVGTKIV ATQQRVAAFE SIEVPEIPEA |

PEEKPSLLDK

| | |
|---|---|
| 801 | ARSLPTREDH T |

[1264] The cp7388 nucleotide sequence <SEQ ID 356> is:

| | |
|---|---|
| 1 | ATGCAAGTAC TTCTATCTCC GCAGCTACCC CCCCCCCCCC AACACTCTGT |
| 51 | AGGGTCGATT TCTTCTCCAT CTAAACTTCG CGTTTTAGCG ATTACTTTTT |
| 101 | TAGTTTTTGG TATGCTCTTA CTGATTTCAG GAGCTCTCTT TCTGACGTTA |
| 151 | GGGATTCCAG GATTGAGTGC AGCAATTTCT TTTGGATTAG GCATCGGTCT |
| 201 | CTCCGCATTA GGAGGAGTGC TGATGATTTC GGGACTACTA TGTCTTTTAG |
| 251 | TAAAACGAGA GATTCCGACA GTACGACCAG AAGAAATTCC TGAAGGGGTT |
| 301 | TCGCTGGCTC CTTCTGAGGA GCCAGCTCTA CAGGCAGCTC AGAAGACTTT |
| 351 | AGCTCAGCTG CCTAAGGAAT TGGATCAGTT AGATACAGAT ATTCAGGAAG |
| 401 | TGTTCGCATG TTTAAGAAAG CTGAAAGATT CTAAGTATGA AAGTCGAAGT |
| 451 | TTTTTAAACG ATGCTAAGAA GGAGCTTCGA GTTTTTGACT TTGTGGTTGA |
| 501 | GGATACCCTC TCGGAGATTT TCGAGTTGCG GCAGATTQTG GCTCAAGAGG |
| 551 | GATGGGATTT AAACTTTTTG ATCAATGGGG GACGAAGCCT CATGATGACT |
| 601 | GCAGAATCTG AATCGCTTGA TTTGTTTCAT GTATCGAAGC GGCTAGGGTA |
| 651 | TTTACCTTCT GGGGATGTTC GAGGGGAGGG GTTAAAGAAA TCTGCGAAGG |
| 701 | AGATAGTCGC TCGTTTGATG AGCTTGCATT GCGAGATTCA CAAGGTGGCG |
| 751 | GTAGCGTTTG ATAGGAATTC CTATGCGATG GCAGAAAAGG CGTTTGCGAA |
| 801 | AGCGTTGGGA GCTTTAGAAG AGAGTGTGTA TCGGAGTCTT ACGCAGAGTT |
| 851 | ATAGAGATAA ATTTTTGGAG AGCGAGAGGG CGAAGATCCC ATGGAATGGG |
| 901 | CATATAACCT GGTTAAGAGA TGATGCGAAG AGTGGGTGTG CTGAAAAGAA |
| 951 | GCTTCGGGAT GCCGAGGAAC GTTGGAAGAA ATTTAGGAAA GCAGTCTTTT |
| 1001 | GGGTAGAAGA AGACGGGGGC TTTGACATCA ATAATCTCCT TGGAGACTGG |
| 1051 | GGGACAGTGC TTGATCCTTA TAGACAAGAG AGAATGGACG AGATAACGTT |
| 1101 | CCATGAGTTG TATGAAAAAA CTACGTTTTT GAAAAGACTG CACAGAAAGT |
| 1151 | GTGCGTTAGC GAAAACAACC TTTGAAAAGA AGAGATCTAA AAAGAATTTG |
| 1201 | CAGGCAGTCG AGGAGGCGAA TGCACGTAGG TTGAAATATG TAAGGGATTG |
| 1251 | GTATGATCAG GAGTTTCAGA AAGCAGGGGA GAGATTAGAG AAACTGCATG |
| 1301 | CTTTGTATCC TGAGGTTTCA GTCTCTATAA GAGAGAACAA AATACAAGAG |
| 1351 | ACGCGCTCTA ATTTAGAGAA AGCCTATGAG GCTATCGAAG AGAACTATCG |
| 1401 | TTGCTGTGTC CGAGAGCAAG AGGACTACTG GAAAGAAGAA GAGAAAAGGG |
| 1451 | AAGCGGAGTT TAGGGAGAGG GGAAACAAGA TTCTTTCTCC TGAGGAGCTG |
| 1501 | GAAAGTTCTT TGGAGCAATT CGACCATGGT TTGAAAAATT TTTCTGAGAA |
| 1551 | ATTAATGGAA TTGGAAGGGC ATATCTTAAA ACTTCAGAAA GAAGCCACAG |
| 1601 | CAGAGGTGGA GAATAAAATA CTTTCAGATG CAGAGAGCCG CCTTGAGATT |
| 1651 | GTATTTGAAG ATGTCAAGGA GATGCCCTGT CGAATTGAGG AGATAGAGAA |
| 1701 | GACGCTGCGT ATGGCGGAGC TGCCCCTACT TCCTACGAAG AAGGCGTTTG |
| 1751 | AGAAGGCCTG CTCACAATAT AATAGCTGCG CAGAGATGTT GGAGAAGGTG |
| 1801 | AAGCCTTACT GCAAGGAGAG CCTCGCCTAT GTGACTAGCA AAGAGCGTTT |
| 1851 | AGTGAGCTTG GATGAAGATT TACGACGAGC CTACACAGAG TGTCAGAAGA |
| 1901 | GATTCCAGGG GGATTCGGGT TTGGAGTCGG AAGTAAGAGC CTGTCGAGAG |
| 1951 | CAACTGCGAG AGCGGATCCA AGAGTTTGAA ACTCAAGGGC TGGACTTGGT |
| 2001 | GGAAAAAGAG TTGCTTTGTG TGAGTAGTAG ATTAAGAAAT ACAGAGTGCG |
| 2051 | ATTGTGTATC TGGTGTTAAG AAAGAAGCAC CTCCTGGTAA GAAGTTTTAT |
| 2101 | GCCCAGTATT ATGATGAGAT TTATCGAGTT AGAGTTCAAT CCCGATGGAT |
| 2151 | GACGATGTCT GAGAGATTGA GAGAGGGAGT TCAAGCATGC AACAAGATGT |
| 2201 | TGAAGGCAGG CCTAAGCGAA GAAGATAAGG TTCTTAAAGA AGAAGAGTAT |
| 2251 | TGGTTGTATC GAGAGGAGAG AAAGAATAAA GAGAAACGTT TGGTTGGTAC |
| 2301 | TAAGATAGTA GCAACGCAGC AGCGAGTTGC AGCATTTGAA TCCATAGAAG |
| 2351 | TTCCTGAGAT TCCTGAGGCC CCAGAGGAGA AACCGAGTTT GCTGGATAAA |
| 2401 | GCGCGTTCTT TATTTACTCG CGAGGACCAT ACCTAG |

[1265] The PSORT algorithm predicts inner membrane (0.461).

[1266] The proteins were expressed in E. coli and purified as his-tag products (FIG. 174: 7200lanes 2-3; 7236=lanes 45; 7268=lanes 6-8; 7375=lanes 9-10; 7388=lanes 11-12). The recombinant proteins were used to immunise rice, whose sera were used in Western blots (FIGS. 174, 175, 176, 177 & 178) and for FACS analysis.

[1267] These experiments show that cp7200, cp7235, cp7268, cp7375 & cp7388 are surface-exposed and immunoaccessible proteins and that they are useful immunogens. These properties are not evident from the sequence alone.

### Example 179

[1268] The following C. pneumoniae protein (PID 4376723) was expressed <SEQ ID 357; cp6723>:

| | |
|---|---|
| 1 | MATSVAPSPV PESSPLSHAT EVLNLPNAYI TQPHPIPAAP |

WETFRSKLST

| | |
|---|---|
| 51 | KHTLCFALTL LLTLGGTISA GYAGYTGNWI ICGIGLGIIV |

LTLILALLLA

| | |
|---|---|
| 101 | IPLKNKQTGT KLIDEISQDI SSIGSGFVQR YGLMFSTIKS |

VHLPELTTQN

| | |
|---|---|
| 151 | QEKTRILNEI EAKKESIQNL ELKITECQNK LAQKQPKRKS |

SQKSFMRSIK

| | |
|---|---|
| 201 | HLSRNPVILF DC* |

[1269] The cp6723 nucleotide sequence <SEQ ID 358> is:

| | |
|---|---|
| 1 | ATGCCAACTT CCGTAGCCCC ATCACCAGTC CCCGAGAGCA |

GCCCTCTCTC

| | |
|---|---|
| 51 | TCATGCTACA GAAGTTCTCA ATCTTCCTAA TGCTTATATT |

ACGCAGCCTC

| | |
|---|---|
| 101 | ATCCGATTCC AGCGGCTCCT TGGGAGACCT TTCGCTCCAA |

ACTTTCCACA

| | |
|---|---|
| 151 | AAGCATACGC TCTGTTTTGC CTTAACACTA CTGTTAACCT |

TAGGGGGAAC

| | |
|---|---|
| 201 | GATCTCAGCA GGTTACGCAG GATATACTGT AAACTGGATC |

ATCTGTGGCA

| | |
|---|---|
| 251 | TCGGCTTGGG AATTATCGTA CTCACACTGA TTCTTGCTCT |

TCTTCTAGCA

| | |
|---|---|
| 301 | ATCCCTCTTA AAAATAAGCA GACAGGAACA AAACTGATTG |

ATGAGATATC

| | |
|---|---|
| 351 | TCAAGACATT TCCTCTATAG GATCAGGATT TGTTCAGAGA |

TACGGGTTGA

| | |
|---|---|
| 401 | TGTTCTCTAC AATTAAAAGC GTGCATCTTC CAGAGCTGAC |

AACACAAAAT

| | |
|---|---|
| 451 | CAAGAAAAAA CAAGATTTTT AAATGAAATT GAAGCGAAAA |

AGGAATCGAT

| | |
|---|---|
| 501 | CCAAAATCTT GAGCTTAAAA TTACTGAGTG CCAAAACAAG |

TTAGCACAGA

| | |
|---|---|
| 551 | AACAGCCGAA ACGGAAATCA TCTCAGAAAT CATTTATGCG |

TAGTATTAAG

| | |
|---|---|
| 601 | CACCTCTCCA AGAACCCTGT AATTTTGTTC GATTGCTGA |

[1270] The PSORT algorithm predicts inner membrane (0.6095).

[1271] The protein was expressed in E. coli and purified as a his-tag product (FIG. 179A). The recombinant protein was used to immunise mice, whose sera were used in a Western blot (FIG. 179B) and for FACS analysis.

[1272] These experiments show that. cp6723 is a surface-exposed and immunoaccessible protein, and that it is a useful immunogen. These properties are not evident from the sequence alone.

### Example 180

[1273] The following C. pneumoniae protein (PID 4376749) was expressed <SEQ ID 359; cp6749>:

| | |
|---|---|
| 1 | MSYYFSLWYL KVQQHFQAAF DFTRSLCSRI SNFALGVIAL |

LPIIGQLYVG

| | |
|---|---|
| 51 | LDWLLSRIKK PEFPSDVDQI VRVEHVVGHD HRSRVEDILK |

RQRLSLEPRD

| | |
|---|---|
| 101 | EGKVHGDLPS APFF* |

[1274] The cp6749 nucleotide sequence <SEQ ID 360> is:

| | |
|---|---|
| 1 | ATGAGTTATT ACTTTTCTCT TTGGTATCTG AAGGTGCAAC |

AGCACTTTCA

| | |
|---|---|
| 51 | AGCAGCATTT GATTTTACTC GCTCCCTGTG TTCACGAATT |

TCTAATTTTG

| | |
|---|---|
| 101 | CTTTGGGAGT GATTGCATTG CTTCCTATTA TTGGGCAGTT |

GTATGTAGGG

| | |
|---|---|
| 151 | CTGGACTGGC TCCTCTCTAG GATAAAAAAG CCAGAATTTC |

CTTCCGATGT

| | |
|---|---|
| 201 | GGATCAGATC GTGCGAGTAG AACACGTCGT GGGTCACGAC |

CATAGAAGTC

| | |
|---|---|
| 251 | GAGTTGAAGA TATTCTAAAG AGACAAAGGC TCTCATTAGA |

GCCTAGAGAC

| | |
|---|---|
| 301 | GAGGGGAAGG TTCACGGAGA TCTGCCTTCA GCTCCTTTTT |

TTTGA

[1275] The PSORT algorithm predicts inner membrane (0.2996).

[1276] The protein was expressed in E. coli and purified as a his-tag product (FIG. 180A). The recombinant protein was used to immunise mice, whose sera were used in a Western blot (FIG. 180B) and for FACS analysis.

[1277] These experiments show that cp6749 is a surface-exposed and immunoaccessible protein, and that it is a useful immunogen. These properties are not evident from the sequence alone.

### Example 181 Example 182, Example 183, Example 184 and Example 185

[1278] The following C. pneumoniae protein (PID 4376301) was expressed <SEQ ID 361; cp6301>:

| | |
|---|---|
| 1 | LNQDLQNVYQ ECQKATGLES EVSAYELHLR EQXTEFETQG |

LDVIKEELLF

| | |
|---|---|
| 51 | VSSTLKSKLS YDPLIADIPC MKFYEEYYDG IDKARVQSRW |

LEKSERYRKA

| | |
|---|---|
| 101 | KKGFQEMLKE GLFKEDQALK KAEYRLLREK RMNKEKLLIC |

NKIEAAQQRV

| | |
|---|---|
| 151 | QEFGPSDS* |

[1279] The cp6301 nucleotide sequence <SEQ ID 362> is:

| | |
|---|---|
| 1 | TTGAATCAGC ATTTACAAAA TGTATACCAA GAGTGCCAGA |

AGGCTACAGG

| | |
|---|---|
| 51 | TTTAGAATCG GAAGTGAGTG CATATAGAGA TCATCTTAGA |

GAGCAGATCA

| | |
|---|---|
| 101 | CAGAGTTTGA AACTCAAGGG CTGGACGTGA TAAAAGAAGA |

ACTTCTTTTT

| | |
|---|---|
| 151 | GTGAGTAGTA CTCTCAAAAG TAAATTGAGC TATGATCCAT |

TAATAGCAGA

| | |
|---|---|
| 201 | CATTCCCTGT ATGAAGTTTT ATGAGGAGTA TTATGATGGC |

ATTGATAAAG

| | |
|---|---|
| 251 | CGAGAGTTCA ATCCCGATGG CTGGAGAAGT CTGAGAGGTA |

TAGAAAGGCG

| | |
|---|---|
| 301 | AAGAAGGGAT TCCAAGAGAT GCTGAAGGAA GGCCTATTCA |

AAGAAGATCA

| | |
|---|---|
| 351 | GGCTTTGAAA AAAGCAGAGT ATAGATTACT TCGAGAGAAG |

AGAATGAATA

| | |
|---|---|
| 401 | AGGAGAAGCT TTTGATTTGC AATAAGATAG AAGCAGCTCA |

GCAGCGAGTC

| | |
|---|---|
| 451 | CAAGAATTTG GACCCTCGGA TTCATAA |

[1280] The PSORT algorithm predicts cytoplasm (0.4621).

[1281] The following C. pneumoniae protein (PID 4376558) was also expressed <SEQ ID 363; cp6558>:

| | |
|---|---|
| 1 | MNIPAPQVPV IDEPVVNNTS SYGLSLKSSL RPITYLILAI |

LAIATLMSVL

| | |
|---|---|
| 51 | YFCGIXSVGT FVLGMLIPLS VCSVLCVAYL FYQQSSIEKT |

KVTSITSPSV

| | |
|---|---|
| 101 | FFSDEDLNLL LGREEDSVSA IDELLKNFPA DDFRRPITT |

YSNFLDEQGR

| | |
|---|---|
| 151 | PNESREEDSH TSKIL* |

[1282] The cp6558 nucleotide sequence <SEQ ID 364> is:

| | |
|---|---|
| 1 | ATGAACATAC CCGCTCCCCA AGTACCAGTC ATAGATGAGC |

CPGTAGTGAA

| | |
|---|---|
| 51 | CAACACAAGT AGCTATGGTC TTTCATTGAA AAGTAGTTTA |

AGACCGATTA

| | |
|---|---|
| 101 | CTTATTTGAT TTTAGCTATC TTAGCTATAG CCACACTGAT |

GTCTGTTCTC

| | |
|---|---|
| 151 | TACTTTTGTG GCATCATTAT TGTTGGGACG TTTGTTTTGG |

GCATGCTGAT

| | |
|---|---|
| 201 | CCCTCThTCG GTCTGCTCTG TTCTTTGCGT TGCCTATTTA |

TTCTATCAGC

| | |
|---|---|
| 251 | AATCTTCThT AGAAAAGACT AAGGTCTTTT CTATAACCAG |

TCCTTCAGTA

| | |
|---|---|
| 301 | TTTTTCTCTT ATGAGGATCT TAATTTACTC TTAGGTCGAG |

AAQAAGATTC

| | |
|---|---|
| 351 | AGTGTCTGCA ATTGATGAAC TTCPTAAGAA CTTTCCAGCT |

GATGATTTCC

| | |
|---|---|
| 401 | GTAGGCCGAA GATGCTTCCT TATTCAAATT TTCTAGATGA |

GCAGGGAAGG

| | |
|---|---|
| 451 | CCTAAIGAGA GTAGGGAAGA AGACTCTCAT ACTTCCAAGA |

TCTTATAA

[1283] The PSORT algorithm predicts inner membrane (0.4630).

[1284] The following C. pneumoniae protein (PID 4376630) was also expressed <SEQ ID 365; cp6630>:

| | |
|---|---|
| 1 | MSMTIVPHAL FKNHCECHST FPLSSRTIVR IAIASLFCIG |

ALAALGCLAP

| | |
|---|---|
| 51 | PVSYIVUSVL APIAFVILSL VILALIFGEK KLPPTTRIIP |

DRFTHVIDTA

| | |
|---|---|
| 101 | YGLSISAFVR EQQVTIAEFR QFSTALLCNI SPEEKIRQLP |

SELRSKVEST

| | |
|---|---|
| 151 | GISPLAGDLE KNNWPIFEDL LSQTCPLYWL QKFISAGDPQ |

VCRDLGVPRE

| | |
|---|---|
| 201 | CYGYYWLGPL GYSTAXAPIP CKETHHILQQ LTKEDVLLLK |

NKALQERWDT

| | |
|---|---|
| 251 | DEVKAIVTRI YTTYTARGTL KTEAGGLTKB TISKELLLLS |

LHGYSFDQLQ

| | |
|---|---|
| 301 | LITQLPRDAW DWLCPVDNST AYNLQLCALV GALSSQNLLD |

EBSIDFDVNL

| | |
|---|---|
| 351 | GLYVIQDLKE AVQAPSASDE PKKELGKFLL RHLSSVSKEL |

ESVLRQGLHR

| | |
|---|---|
| 401 | IALEHGNARA RVYDVNFVTQ ARIHRKTSIF FKD* |

[1285] The cp6630 nucleotide sequence <SEQ ID 366> is:

| | |
|---|---|
| 1 | ATGAGCATGA CGATCGTTCC ACATGCTTTA TTTAAAAATC |

ATTGCGAGTG

| | |
|---|---|
| 51 | TCATTCTACC TTTCCTTTGA GTTCAAGGAC TATTGTAAGT |

ATAGCCATTG

| | |
|---|---|
| 101 | CCAGCCTCTT TTGTATTGGT GCATTAGCAG CTTTAGCCTG |

TTTGGCTCCT

| | |
|---|---|
| 151 | CCCGTTTCTT ATATTGTTGG GAGTGTTTTA GCTTTTATTG |

CCTTTGTCAT

| | |
|---|---|
| 201 | TCTTTCTTTA GTAATTTTAG CTTTGATTTT TGGAGAGAAG |

AAGCTTCCAC

| | |
|---|---|
| 251 | CAACACCAAG AATCATTCCT QATATATTTA CTCACGTGAT |

AGATQTQCJT

| | |
|---|---|
| 301 | TATGGCCTTT CAATCTCTGC ATTTGTAAGA GAACAGCAGQ |

TAACATTAGC

| | |
|---|---|
| 351 | CGAGTTTAGA CAATTTTCTA CTGCCCTCTT GTGTAACATA |

TCTCCTGAAG

| | |
|---|---|
| 401 | AGAAAATCAA ACAATTCCCT TCTGAATTGC GAAGTAAAGT |

AGAGAGTTTT

| | |
|---|---|
| 451 | GGTATTAGCA GGCTCGCAGG TGATTTAGAA AAGAATAATT |

GGCCAATATT

| | |
|---|---|
| 501 | TGAAGATCTT TTAAGCCAAA CCTTCCCGTT ATATTGGCTT |

CAGAAATTTA

| | |
|---|---|
| 551 | TATCAGCAGG AGATCCACAA GTTTGTAGAG ACCTAGGTGT |

CCCTAGAGAA

| | |
|---|---|
| 601 | TGTTATGGGT ACTATTGGCT AGGGCCTTTG CGATACAGTA |

CAGCTAAGGC

| | |
|---|---|
| 651 | TACAATTTTT TGTAAAGAGA CGCATCATAT TCTTCAACAA |

TTAACGAAAG

| | |
|---|---|
| 701 | AGGACGTTCT TTTATTAAAA AACAAGGCTC TTCAAGAGAA |

ATGGGATACT

| | |
|---|---|
| 751 | GATGAAGTCA AAGCAATTGT AGAGCGTATC TACACTACCT |

ATACGGCACG

| | |
|---|---|
| 801 | AGGAACTCTA AAGACCGAAG CAGGGGTACT TACAAAAGAG |

ACAATCAGTA

| | |
|---|---|
| 851 | AGGAATTGCT ATTGTTGAGC TTGCATGGCT ATTCTTTTGA |

TCAGCTACAG

| | |
|---|---|
| 901 | CTGATCACTC AACTTOCTAG AGATGCTTTG GATTGGCTGT |

GTTTTGTAGA

| | |
|---|---|
| 951 | TAACAGTACC GCATACAACC TTCAGCTTTG TGCTCTTGTA |

GGAGCTTTGT

| | |
|---|---|
| 1001 | CATCCCAAAA TCTTCTTGAC GAATCTTCTA TCGATTTTGA |

TGTAAACCTA

| | |
|---|---|
| 1051 | GGCCTGTATG TGATTCAGGA TCTAAAAGAA TCTGTTCAAG |

CATTTTCTGC

| | |
|---|---|
| 1101 | TTCTGATGAG CCAAAGAAAG AACTAGGTAA ATTCTTGTTA |

AGGCATTTGA

| | |
|---|---|
| 1151 | GTTCAGTTTC TAAGCGATTA GAGAGTGTAT TAAGACAGGG |

TCTTCACAGA

| | |
|---|---|
| 1201 | ATAGCTCTAG AGCATGGAAA TGCCAGAGCT ATGGTTTATG |

ACGTCAATTT

| | |
|---|---|
| 1251 | TGTAACAGGA GCTAGAATTC ATAGGAAGAC GAGThTCTTC |

TTTAAAGACT

| | |
|---|---|
| 1301 | AA |

[1286] The PSORT algorithm predicts inner membrane (0.7092).

[1287] The following C. pneumoniae protein (PID 4376633) was also expressed <SEQ ID 367; cp6633>:

| | |
|---|---|
| 1 | MVNIQPVYRW TQVNYSQATQ FSVCQPALSL IIVSVVAAVL |

AIVALVCSQS

| | |
|---|---|
| 51 | LLSIELGTAL VLVSLILFAS AMFTMIYTRQ BPKBLLIPKK |

IMTLIQEHYP

| | |
|---|---|
| 101 | SIVVDFIRDQ EVSIYEIHHL ISILTRTNVF DKAPVYLQEK |

LLQFGIEKFK

| | |
|---|---|
| 151 | DVHPSKLPNF EEILLQHCPL HWLGRLVYPM VSDVTTGTYG |

YYWCGPLGLY

| | |
|---|---|
| 201 | ENAPSLFERR SLLLLKKISF GEFALLEDGL KTNTWSSSEL |

VQIRQNLFTR

| | |
|---|---|
| 251 | YYADKTEVDE AELNADYEQE DSLLHLIFSH KLS* |

[1288] The cp6633 nucleotide sequence <SEQ ID 368> is:

| | |
|---|---|
| 1 | ATGGTTAATA TACAGCCTGT GTATAGQAAT ACCCAAGTCA |

ACTATAGTCA

| | |
|---|---|
| 51 | GGCTACCCAA TTTTCGGTGT GCCAGCCAGC GCTTAOCCTG |

ATTATCGTTT

| | |
|---|---|
| 101 | CTGTTGTTGC TGCTGTACTC GCTATTGTAG CTTTGGTATG |

CAGTCAATCT

| | |
|---|---|
| 151 | CTTTTATCCA TAGAGTTAGG AACTGCTCTT GTTCTAGPTT |

CTCTTATTCT

| | |
|---|---|
| 201 | TTTTGCTTCT GCTATGTTTA TGATTTATAA GATGAGACAA |

GAACCTAAGG

| | |
|---|---|
| 251 | AGTTGCTGAT CCCTAAGAAA ATCATGGAAC TCATCCAAGA |

ACATTATCCA

| | |
|---|---|
| 301 | AGTAATGTTG TTGATTTTAT TAGAGATCAG GAGGTTTCCA |

TTTATGAGAT

| | |
|---|---|
| 351 | ACATCACTTG ATCTCTATTC TTAATAAGAC GAATGTTTTC |

GACAAAGCAC

| | |
|---|---|
| 401 | CAGTATATTT ACAAGAAAAA CTCTTACAGT TTGGCATTGA |

GAAGTTCAAA

| | |
|---|---|
| 451 | GATGTACATC CAAGTAAGCT CCCTAATTTT GAAGAAATTC |

TTCTACAGCA

| | |
|---|---|
| 501 | TTGCCCATTG CATTGGTTGG GACGTCTGGT ATATCCCATG |

GTATCGGATG

| | |
|---|---|
| 551 | TCACTCCAGG AACCTATGGA TACTATTGGT GTGGTCCTTT |

AGGACTGTTC

| | |
|---|---|
| 601 | GAGAACGCTC CCTCTCTTTT TGAACGTCGA TCTCTTCTAT |

TGTTAAAGAA

| | |
|---|---|
| 651 | AATTAGCTTT GGAGAGTTTG CTCTTTTAQA AGWTGGTCTC |

AAGAAAAACA

| | |
|---|---|
| 701 | CGTGGAGTTC TTCGGAACTC GTTCAAATCT GACAAAACCT |

TTTTACAAGA

| | |
|---|---|
| 751 | TATTATGCTG ATAAAGAAGA GGTAGATGAA GCAGAGTTAA |

ACTCTGATTA

| | |
|---|---|
| 801 | CGAACAGTDT GATTCCCTCC TTCACCTTAT TTTTTCTCAC |

AAGCTCTCTT

| | |
|---|---|
| 851 | GA |

[1289] The PSORT algorithm predicts inner membrane (0.7283).

[1290] The following C. pneumoniae protein (PID 4376642) was also expressed <SEQ ID 369; cp6642>:

| | |
|---|---|
| 1 | MATISPISLT VDHPLVDTKK KSCSNFDKIQ SRILLITAIF AVLVTIGTLL |
| 51 | IGLLLNIPVI YFLTGISFIA VVLSNFILYX RATTLLRPRA CGKHKEIKPK |
| 101 | RVSTNLQYSS ISIAINRSKE NWEHQPKDLQ NLPAPSALLT DNPYEIWKAX |
| 151 | HSLFSLVSLL PGGNPEHLLI SASENLGKTL LIEETSQNAP ISSYVDTTPS |
| 201 | PRSLLNEAIQ ETRVEINTEL PAGDSGERLY WQPDFRGRVF LPQIPTTPEA |
| 251 | IYQYYYALYV TYIQTAINTN TQIIQIPLYS LREHLYSREL PPQSRMQQSL |
| 301 | AMITAVKYMA ELHPEYPLTI ACVERSLAQL PQESIEDLS* |

[1291] The cp6642 nucleotide sequence <SEQ ID 370> is:

| | |
|---|---|
| 1 | ATGGCTACAA TCTCACCCAT ATCTTTAACT GTAGATCATC CCCTAGTAGA |
| 51 | CACTAAAAAA AAATCCTGCA QCAACTTTGA TAAGATTCAG TCTCGAATTC |
| 101 | TATTGATTAC TGCAATCTTT GCTGTCTTAQ TTACTATAGG GACCCTACTT |
| 151 | ATTGGTTTGC TTTTAAATAT TCCTGTTATC TATTTCCTCA CAGGAATTTC |
| 201 | ATTTATTGCT GTTGTTCTTA GCAACTTTAT CCTTTATAAA CGAGCAACCA |
| 251 | CCCTCTTAAA ACCGCGTGCT TGTGGCAAAC ACAAAGAAAT AAAACCAAAA |
| 301 | AGGGTCTCCA CCAACCTACA GTATTCTTCT ATCTCTATCG CAATCAATCG |
| 351 | TTCTAAAGAA AACTGGGAAC ACCAACCCAA GGACCTACAG AATCTCCCCG |
| 401 | CACCCTCTGC ATTACTCACA GATAACCCTT ACGAGATATG GAAAGCTAAA |
| 451 | CATTCACTGT TTTCCCTAGT ATCCCTCCTA CCGGGAGQCA ATCCAGAACA |
| 501 | TCTCTTAATT TCAGCTTCCG AAAATTTAGG AAAGACTCTG TTAATTGAAG |
| 551 | AAACCTCGCA AAATGCGCCT AWATCCTCCT ACGTAGAQAC CACTCCCTCC |
| 601 | CCAAAATCCT TGCTCAATGA GGCAATTCAG GAAACCAGGG TAGAAATAAA |
| 651 | TACAGAACTC CCTGCGGGAG ATTCAGGAGA ACGTTTATAC TGGCAACCCG |
| 701 | ATTTCCGAGG CCGCGTCTTC CTCCCACAAA TACCAACAAC TCCTGAAGCC |
| 751 | ATCTACCAAT ACTACTATGC ACTCTATGTC ACTTATATCC AGACAGCGAT |
| 801 | CAATACGAAC ACCCAAATTA TCCAAATCCC TTTATACAAC TTGAGGGAGC |
| 851 | ATCTCTATTC TAGAGAATTG CCCCCGCAAT CAAGAATGCA ACAATCTTTG |
| 901 | GCTATGATTA CAGCAGTAAA ATACATGGCC GAGCTGCACC CAGAATATCC |
| 951 | GCTAACTATT GCTTGTGTTG AAAGATCCTT AGCCCAACTA CCTCAAGAAA |
| 1001 | GTATTGAGGA TCTCTCTTAG |

[1292] The PSORT algorithm predicts inner membrane (0.5288).

[1293] The proteins were expressed in E. coli and purified as GST-fusion products. The recombinant proteins were used to immunise mice, whose sera were used in Western blots (FIGS. 181-185) and for FACS analysis.

[1294] These experiments show that cp6301, cp6558, cp6630, cp6633 and cp6642 are surface-exposed and immunoaccessible proteins, and that they are useful immunogens. These properties are not evident from their sequences alone.

### Example 186

[1295] The following C. pneumoniae protein (PID 4376389) was expressed <SEQ ID 371; cp6389>:

| | |
|---|---|
| 1 | MSEVKPLFLK NDSFDLATQR FQNLINMLQA QAEIYNEYHE KNARVQNEIK |
| 51 | EQKDFVKRCI EDFEMAGLGV LKEELASLTR DFHDKAKAET SMLIECPCIG |
| 101 | FYYSIHQEEQ RQEQERLQKM AERYRDCKQV LEAVQVEQKD MISSRVVVDD |
| 151 | SYFEEEKEEQ DVKNEKKEQD * |

[1296] The cp6389 nucleotide sequence <SEQ ID 372> is:

| | |
|---|---|
| 1 | ATGDCAGAAG TGAAGCCTTT GTTTTTAAAG AATGACTCTT TTGATTTGGC |
| 51 | AACTCAGAGA TTCCAGAATC TAATTAACAT GCTACAAGAG CAAGCCGAGA |
| 101 | TATATAACGA GTATGAAGAA AAGAATGCTA GGGTTCWJAA TGAGATTAAG |
| 151 | GAGCAAAAGG ACTTTGTGAA AAGATGCATA GAGGACTTTG AAGCCAGAGG |
| 201 | ACTGGGGGTG CTAAAAGAAG AGCTTGCATC TTTGACGCGT GATTTCCATG |
| 251 | ATAAAGCAAA AGCAGAGACT TCTATGCTCA TTGAATGTCC TTGTATTGGT |
| 301 | TTTTATTATA GTATTCATCA GGAGGAACAA AGGCAAAGGC AAGAAAGGCT |
| 351 | TCAAAAGATG GOTGAGCGCT ATAGGGACTG TAAACAAGTC TTGGAGGCTG |
| 401 | TCCAGQTGGA GCAAAAAGAT ATGATATCTT CTAGAGTCGT TGTCGATGAC |
| 451 | AGCTACTTTG AAGAAGAAAA AGAAGAACAA AAGGTGGATA ACAGAAAGAA |
| 501 | AGAACAGGAC TAG |

[1297] The PSORT algorithm predicts cytoplasm (0.3193).

[1298] The protein was expressed in E. coli and purified as a GST-fusion product (FIG. 186A) and also in his-tagged form. The recombinant proteins were used to immunise mice, whose sera were used in a Western blot (FIG. 186B) and for FACS analysis

[1299] These experiments show that cp6389 is a surface-exposed and immunoaccessible protein, and that it is a useful immunogen. These properties are not evident from the sequence alone.

### Example 187

[1300] The following C. pneumoniae protein (PID 4376792) was expressed <SEQ ID 373; cp6792>:

| | |
|---|---|
| 1 | VLQEHFFLSE DVITLAQQLL GHKLITTHEG LITSGYIVET EAYRGPDDKA |
| 51 | CHAYNYRKTQ RNRAMYLKGG SAYLYRCYGM HHLLNVVTGP EDIPHAVLIR |
| 101 | AILPDQGKEL MIQRRQWRDK PPHLLTNGPG KVCQALGISL ANNRQRLNTP |
| 151 | ALYISKEKIS GTLTATARIG IDYAQEYRDV PWRFLLSPED SGKVLS* |

[1301] The cp6792 nucleotide sequence <SEQ ID 374> is:

| | |
|---|---|
| 1 | GTGCTACAAG AACATTTTTT TCTATCGGAA GATGTAATTA CACTAGCGCA |
| 51 | ACAGCTTTTA GGACATAAAC TCATCACAAC ACAAGAGGGA CTGATAACTT |
| 101 | CAGGTTACAT TGTAGAAACC GAAGCGTATC GTGGCCCTGA TGACAAAGCA |
| 151 | TGCCACGCCT ACAACTACAG AAAAACTCAG AGGAACAGAG CGATGTACCT |
| 201 | GAAAGGAGGC TCTGCTTACC TCTACCGTTG CTATGGCAEG CATCACCTAT |
| 251 | TGAATGTTGT CACTGGACCT GAGGACATTC CCCATGCCGT CCTGATCCGG |
| 301 | GCCATCCTTC CTGATCAAGG CAAAGAACTT ATGATCCAAC GCCGCCAATG |
| 351 | GAGAGATAAA CCCCCACACC TTCTCACCAA TGGACCCGGA AAAGTGTGCC |
| 401 | AAGCTCTAGG AATCTCTTTG GAAAACAATA GGCAACGCCT AAATACCCCA |
| 451 | GCTCTCTATA TCAGCAAAGA AAAAATCTCT GGGACTCTAA CAGCAACTGC |
| 501 | CCGGATCGGC ATCQATTATG CTCAAGAGPA TCGTGATGTC CCATGGAGAT |
| 551 | ATCTCCTATC CCCAGAAGAT TCGGGAAAAG TTTTATCTTA A |

[1302] The PSORT algorithm predicts cytoplasm (0.180).

[1303] The protein was expressed in E. coli and purified as a his-tagged product (FIG. 187A; lanes 2-4). The recombinant protein was used to immunise mice, whose sera were used in a Western blot (FIG. 187B) and for FACS analysis.

[1304] These experiments show that cp6792 is a surface-exposed and immunoaccessible protein, and that it is a useful immunogen. These properties are not evident from the sequence alone.

### Example 188

[1305] The following C. pneumoniae protein (PID 4376868) was expressed <SEQ ID 375; cp6868>:

| | |
|---|---|
| 1 | MVETVLHNFQ RYLSKYLYRV FRPPCRKKTF LSSHRVLARP SFPVDYCPGK |
| 51 | IYDLQEIYEE LNAQLFQGAL RLQIGWFGRK ATRKGKSVVL GLFHENEQLI |
| 101 | RIHRSLDRQE IPRFFMETAV YHEHVHSVVP REYSLSGRSI FMGKKFKEYE |
| 151 | QRFPLYDRAV AWEKANAYLL RGYKKRVGGG YGRA* |

[1306] The cp6868 nucleotide sequence <SEQ ID 376> is:

| | |
|---|---|
| 1 | ATGGTTGAAA CAGTACTTCA TAATTTCCAA CGTTATCTGA GCAAGTATCT |
| 51 | CTATAGGGTA TTTCGCTTCC CATGTCGTAA AAAGACGTTC CTATCTTCGC |
| 101 | ACAGGGTTCT TGCTCGTCCT TCATTCCCAG TAAACTACTG TCCGGGAAAG |
| 151 | ATCTATGATT TCCAGGAGAT CTATGAGGAA TTGAATGCGC AGTTATTTCA |
| 201 | AGGTGCACTG CGTTTACAGA TTGGTTGGTT CGGAAGGAAA GCTACCAGAA |
| 231 | AAGGCAAGAG TGTTGTCTTG GGATTGTTTC ATGAAAATGA ACAGTTAATT |
| 301 | CGAATTCATC GTTCTTTAGA TCGGCAGGAA ATCCCAAGAT TTTTTATGGA |
| 351 | ATATCTTGTG TATCATGAAA TGGTTCATAQ TGTAGTCCCT AGAGAGTATT |
| 401 | CTCTATCGGG GCGTTCGATT TTTCATGGTA AAAAGTTTAA AGAATACGAA |
| 451 | CAACGTTTCC CCTTGTATGA TCGTGCTGTT GCTTGGGAAA AGGCAAACGC |
| 501 | TTATTTATTG CGAGGGTATA AAAAAAGAGT AGGTGGAGGA TATGGCAGGG |
| 551 | CATAG |

[1307] The PSORT algorithm predicts bacterial cytoplasm (0.325).

[1308] The protein was expressed in E. coli and purified as a his-tag product (FIG. 188A; lanes 2-3). The recombinant protein was used to immunise mice, whose sera were used in a Western blot (FIG. 188B) and for FACS analysis.

[1309] These experiments show that cp6868 is a surface-exposed and immunoaccessible protein, and that it is a useful immunogen. These properties are not evident from the sequence alone.

### Example 189

[1310] The following C. pneumoniae protein (PID 4376894) was expressed <SEQ ID 377; cp6894>:

| | |
|---|---|
| 1 | MYKRCVLDKI LKGXVAGSLI LLYWSSDLLE RDIKSIKGNV RDIQEDIREI |
| 51 | SRVVKQQQTS QAIPAAPGVM LAPKLVRDEA FALLPGPPSY PNLLSLDPYK |
| 101 | QQTLPELLGT NFHPHGILRA AHVGKPENLS PPNGFDYVVG FYDLCIPSIA |
| 151 | SPHVGKYBEF SPDLAVKIAE HLVEDGSGDK EPHIYLRPNV FWRPIDPAAL |
| 201 | PKHVQLDEVF QRPHPVTAHD IKPFADAVMA PYVATNRAVA LRSCYEDVVS |
| 251 | VSVENDLKLV VRWKAHTVIN EEGKEERKVL YSAFBNTLSL QPLPRFVYQY |
| 301 | PANGEKIIED ENIDTYRTNS IWAQNFTMHW ANNYIVSCGA YAFAGWDDEK |
| 351 | IVFERNPDFY DPLAALIDKR FVYFDESTDS LFQDFKTGKI DIBYLPPNQR |
| 401 | DNFYSPNKSS AYNKQVAKGG AVRATVSADR AYTYIGWNCF SLFPQSRQVA |
| 451 | CAMNMAIDEE RIIEQCLDGQ GYTISGPFAB SSPSYNKQIE GWHYSPERAA |
| 501 | ALLEEEGWTD TDGDGIRBKV IDGVIVPFRF ELCYYVKBVT AHTIADYVAT |
| 551 | AGNEIGIECS LLGLDMADLS QAFDEKNFDA LLMGWCLGIP PEDPRALWHS |
| 601 | EGA4EKGSAN VVGFHNEEAD KIIDRLSYEY DLKERNRLYH AFHEIIHEEA |
| 651 | PYAPLFSRMC SLLYKDYVKN IFVPTHRTDL IPEAQDETVN VTMVWLEKKE |
| 701 | DPCLSTS* |

[1311] The cp6894 nucleotide sequence <SEQ ID 378> is:

| | |
|---|---|
| 1 | ATGTATAAAA GATGTGTGCT AGATAAAATT TTAAAGGGGA TTGTCGCCGG |
| 51 | TTCTTTAATT TTGTPATACT GGTCCTCAGA CCTACTTGAA AGAGACATTA |
| 101 | AGTCGATAAA AGGTAACGTA AGAGATATTC AAGAAGACAT TCGTGAAATC |
| 151 | TCACGCGTAG TGAAACAACA GCAGACATCA CAAGCTATCC CTGCGGCACC |
| 201 | TGGGGTGATG CTCGCTCCTA AGCTCGTCAG AGACGAAGCT TTTGCTCTAC |
| 251 | TCTTTGGAGA TCCTAGTTAT CCTAATTTAC TTTCCCTAGA CCCCTATAAA |
| 301 | CAGCAGACTC TTCCTGAACT TCTAGGAACA AATTTCCACC CTCATGGTAT |
| 351 | CCTACGCACT GCCCATGTCG GAAAACCCGA AAATCTGAGC CCTTTTAATG |
| 401 | GCTTTGATTA TGTCGTGGGC TTTTACGATC TCTGTATTCC TAGTTTAGCT |
| 451 | TCTCCCCACG TAGGGAAATA CGAAGAATTT TCTCCAGATC TCGCTGTGAA |
| 501 | AATAGAAGAA CATCTTGTTG AAGATGGTTC TGGGGATAAA GAGTTTCACA |
| 551 | TCTATCTGAG GCCGAATGTT TTTTGGCGTC CTATAGATCC TAAGGCCCTT |
| 601 | CCAAAACACG TTCAGTTAGA CGAAGTATTT CAACGTCCTC ATCCTGTGAC |
| 651 | AGCTCATGAT ATTAAGTTTT TCTACGACGC TGTTATGAAC CCTTATGTAG |
| 701 | CAACCATGCG AGCAGTGGCT CTGCGCTCTT G1TATGAAGA TGTGGTTTCA |
| 751 | GTCTCAGTAG AAAACGATTT AAAATTAGTA GTCAGATGGA AAGCACACAC |
| 801 | GGTAATCAAT GAAGAAGGAA AGGAAGAGCG CAAAATGCTC TACTCTGCAT |
| 851 | TTTCTAATAC CTTAAGCTTG CAGCCCCTCC CTAGATTTGT ATATCAGTAT |
| 901 | TTTGCTAACG GGGAAAAAAT CATTGAAGAT GAGAAPATCG ATACCTACCG |
| 951 | AACCAATTCC ATTTGGGCGC AAAACTTCAC TATGCATTGG GCAAACAACT |
| 1001 | ATATTGTAAG TTGTGGAGCC TACTACTTTG CAGGGATGGA TGATGAGAAA |
| 1051 | ATCGTGTTTT CTAGAAATCC TGACTTCTAT GATCCTCTTG CGGCTCTTAT |
| 1101 | TGACAAGCGT TTCGTCTATT TTAAGGAAAG CACAGACTCC CTATTCCAAG |
| 1151 | ATTTTAAGAC AGGGAAAATA GACATCTCTT ACCTTCCACC CAACCAAAGA |
| 1201 | GATAATTTCT ATAGTTTTAT GAAAAGCTCC GCTTATAACA AACAGGTAGC |
| 1251 | TAAGGGAAGA GCCGTCCGTG AAACAGTCTC AGCAGATCCA GCATATACGT |
| 1301 | ACATAGGATG GAATTACTTT TCATTATCTT TCCAAAGCCG ACAGGTGCGC |
| 1351 | TGTGCTATGA ACATGGCAAT CGATAGAGAG AGGATTATCG AACAGTGCTT |
| 1401 | GGATGGCCAA GGCTATACGA TTAGTGGGCC TTTTGCTTCG AGTTCTCCTT |
| 1451 | CTTATAATAA ACAGATCGAA GGGTGGCATT ATTCTCCAGA AGAAGCAGCT |
| 1501 | CGTCTCCTGG AAGAAGAGGG ATCGATAGAT ACCGATGGCG ATGGAATCCG |
| 1551 | AGAAAAAGTT ATCGATGGTG TGATTGTCCC GTTCCGTTTC CGTTTATGCT |
| 1601 | ATTATGTAAA GAGTGTCACC GCTCATACCA TWCCAGATTA CGTAGCTACT |
| 1651 | GCTTGTAAGG AAATCGGAAT CGAGTGTAGC CTTCTAGGAC TAGATATGGC |
| 1701 | CGATCTTTCG CAAGCTTTTG ATGAAAAGAA TTTCGATGCT CTTTTAATGG |
| 1751 | GATGGTGTTT AGGAATTCCT CCTGAGGATC CTAGGGCTTT ATGGCATTCT |
| 1801 | GAAGGGGCTA AGGAAAAGGG TTCAGCGAAT GTTGTAGGTT TCCATAATGA |
| 1851 | AGAAGCTGAT AAAATCATAG ACAGACTCAG CTACGAATAC GATCTGAAAG |
| 1901 | AACGTAATCG CCTGTACCAC CGTTTCCATG AAATTATTCA TGAGGAAGCT |
| 1951 | CCTTATGCTP TCTTGTTCTC ACGACATTGT TCCTTACTTT ATAAGGATTA |
| 2001 | TGTAAAAAAT ATTTTCATAC CTACACATAG AACAGATTTA ATTCCTGAAG |
| 2051 | CTCAGGATGA GACTGTCAAC GTAACTATGG TATGACTTGA GAAGAAGGAG |
| 2101 | GATCCGTGCT TAAGTACATC CTAA |

[1312] The PSORT algorithm predicts inner membrane (0.162).

[1313] The protein was expressed in E. coli and purified as a his-tag product (FIG. 189A) and also in GST/his form. The recombinant proteins were used to immunise mice, whose sera were used in a Western blot (FIG. 189B) and for FACS analysis.

[1314] These experiments show that cp6894 is a surface-exposed and immunoaccessible protein, and that it is a useful immunogen. These properties are not evident from the sequence alone.

### Example 190

[1315] The following C. pneumoniae protein (PID 4377193) was identified in the 2D-PAGE experiment <SEQ ID 379; cp7193>:

| | |
|---|---|
| 1 | MKRVIYKTIF CGLTLLTSLS SCSLDPKGYN LETKNSRDLN QESVILKENR |
| 51 | ETPSLVKRLS RRSRRLFARR DQTQKDTLQV QANTKTYAEK ISEQDERDLS |
| 101 | FVVSSAAEKS SISLALSQGE IKDALYRIRE VHPLALIEAL AENPALIEGM |
| 151 | KKMQGRDWIW NLFLTWLSEV FSQAWSQGVI SREDIAAFAS TLGLDSGTVA |
| 201 | SIVQGERWPE LVDIVIT* |

[1316] A predicted leader peptide is underlined.

[1317] The cp7193 nucleotide sequence <SEQ ID 380> is:

| | |
|---|---|
| 1 | ATGAAAAGAG TCATTTATAA AACCATATTT TGCGGGTTAA CTTTACTTAC |
| 51 | AAGTTTGAGT AGTTGTTCCC TGGATCCTAA AGGATATAAC CTAGAGACAA |
| 101 | AAAACTCGAG GGACTTAAAT CAAGAGTCTG TTATACTGAA GGAAAACCGT |
| 151 | GAAACACCTT CTCTTGTTAA GAGACTCTCT CGTCGTTCTC GAAGACTCTT |
| 201 | CGCTCGACGT GATCAAACTC AGAAGGATAC GCTGCAAGTG CAAGCTAACT |
| 251 | TTAAGACCTA CGCAGAAAAG ATTTCAGAGA AGGACGAAAG AGACCTTTCT |
| 301 | TTCGTTGTCT CGTCTGCTGC AGAAAAGTCT TCAATTTCGT TAGCTTTGTC |
| 351 | TCAGGGTGAA ATTAAGGATG CTTTGTACCG TATCCGAGAA GTCCACCCTC |
| 401 | TAGCTTTAAT AGAAGCTCTT GCTGAAAACC CTGCCTTGAT AGAAGGGATG |
| 451 | AAAAAGATGC AAGGCCGTGA TTGGATTTGG AATCTTTTCT TAACACAATT |
| 501 | AAGTGAAGTA TTTTCTCAAG CTTGGTCTCA AGGGGTTATC TCTGAAGAAG |
| 551 | ATATCGCCGC ATTTGCCTCC ACCTTAGGTT TGGACTCCGG GACCGTTGCG |
| 601 | TCCATTGTCC AAGGGGAAAG GTGGCCCGAG CTTGTGGATA TAGTGATAAC |
| 651 | TTAA |

[1318] The PSORT algorithm predicts periplasmic (0.925).

[1319] This shows that cp7193 is an immunoaccessible protein in the EB and that it is a useful immunogen. These properties are not evident from the protein's sequence alone.

[1320] It will be appreciated that the invention has been described by way of example only and that modifications may be made whilst remaining within the spirit and scope of the invention.

TABLE II

Sequences of the Primers used to Amplify Cpn Genes.

| | | |
|---|---|---|
| Orf ID | N-terminus final primer | C-terminus final primer |

| | | |
|---|---|---|
| CP0014P | GCGTC CCG GGTCATATG AAGTCTTCTTTCCCCA | GCGT CTC GAG ATGAAAGAGTTTTTGCG |
| CP0015P | GCGTCCCGGGTCATATG TCAGCTCTGTTTTCTGA | GCGT CTC GAG GAATTGGTATTTTGCTC |
| CP0016P | GCGTCCCGGGTCATATG GCCGATCTCACATTAG | GCGT CTC GAG GTCCAAGTTAAGGTAGCA |
| CP0017P | GCGT CCG GGTCATATG GGTATCAAGGGAACTG | GCCGT CTC GAG AAATCCGAATCTTCC |
| CP0019P | GCGTCCCGGGTCAT ATGCAAGACTCTCAAGACTATAG | GOUT CTC GAG AAATCGGTATTTACCC |
| CP626OP | GCGTC CCG GGT GCTAGCACTACGATTTCTTTAACCC | GCGT CTC GAG AAAACGAAATTTGCTTC |
| CP6397P | GCGTC CCG GGTCATATGTTTAAACTGCTAAAAAATCTATT | GCGT CTC GAG ATGAAAGAAGAGTCCTCG |
| CP6456P | GCGTC CCG GGT CATATG TCATCTCCTGTAAATAACA | CGGT CTC GAG CTGACCATCTCCTGTT |
| CP6466P | GCGTC CCG GGT CAT ATG TGCAAGGAGTCCAGT | GCGT CTC GAG ATTTTCCTTAGCATAACG |
| CP6467P | GCGTC CCG GGT CAT ATG TGTTCCCCATCOOAA | GCGT CTC GAG TAGTTTTTCTATAAAACGAAAGTCT |
| CP6468P | GCGTC CCG GGT CAT ATG TGCTCCTCCTACTCTTC | GCGT CTC GAG GGGGAAATAGGTATATTTGA |
| CP6469P | GCGTC CCG GGT CAT ATG AGCTGCTCAAAGCAA | GCGT CTC GAG ACTTAAGATATCGATATTTTTGA |
| CP6552P | GCGTC CCG GGT CAT ATC TGCCATAAGGAAGATG | GCGT CTC GAG ACCATTGTCTTGAGTCAT |
| CP6567P | GCGTC CCG GGT CAT ATG ACCTCACCGATCCCC | GCGT CTC GAG AGAAGCCGGTAGAGGC |
| CP6576P | GCGTC CCG GGT CAT ATG ACTGAAAAAGTTAAAGAAGG | GCGT CTC GAG GAA CATGCCCCCTAA |
| CP6727P | GCGTC CCG GGT CATATCGTACATCCACTAATGGC | GCGT CTC GAG GAAAGAATAACGAGTTCC |
| CP6729P | GCGTC CCG GGT CAT ATGGCAGATGCTTCTTTATC | GCGT CTC GAG GAATGAGTATCTTAGCC |
| CP6731P | GCGTC CCG GGT CATATGGCTGTTGTTGAAATCAAT | GCGTC CAT GGC GGC CGC GAACTGGAACTTACCTCC |
| CP6736P | GCGTC CCG GGT GCT AGCGTAGAAGTTATCATGCCTT | GCGTC CAT GGC GGC CGC AAATCGTAATTTGCTTC |
| CP6737P | GCGT GGA TCC CAT ATG GAGACTAGACTCGGAGG | GCGT CTC GAG AAATGTGGATTTTAGTCC |
| CP6751P | GCGTC CCG GGT GCT AGC AATGAAGGTCTCCAACT | GCGT CTC GAG AAATCTCATTCTACTCGC |
| CP6752P | GCGTGA ATT CAT ATGTTCGGGATGACTCCT | GCGT CTC GAG GAATTTTAAGGTACTTCCTG |
| CPG753P | GCGTC CCG GGT GCT AGCACTCCCTACTCTCATAGAG | GCGT CTC GAG AAACTTAAAGGTCGTTC |
| CP6767P | GCGTC CCG GGT CAT ATG ATAAAACAAATAGGCCGT | GCGT CTC GAG TTCGTAAGCAACTTCAGA |
| CP6829P | GCGTC CCG GGT CAT ATG AAGCAGATGCGTCTTT | GCGTC CAT GGC GGC CGC GAATACAAACCGGATCC |
| CP6830P | GCGTC CCG GGT CAT ATG GATCCCGCGTCTGTT | GCGT CTC GAG TAAACTAGAAAAAGTCGTC |
| CP6832P | GCGTC CCG GGT CAT ATG CATAAAGTAATAGTTTTCATTT | GCGT CTC GAG TAAACTAGAAAAAGTCGT |
| CP6848P | GCGTC CCG GGT CAT ATG TCATCAAATCTACATCCC | GCGT CTC GAG AACCGGAGCTATTTTAC |
| CP6849P | GCGTC CCC GGT GCT AGC AGCGGGGGTATAGAG | GCGT CTC GAG ATACACGTGGGTATTTTC |
| CPG850P | GCGTC CCG GGT CAT ATG TGCCGCATTGTAGAT | GCGT CTC GAG CTGTTTGCATCTGCC |
| CP6854P | GCGTC CCG GGT GCT AGC TCAATAGCTATTGCAAG | GCGT CTC GAG TTATCGAAATGTCTTTG |
| CP6879P | GCGTC CCG GGT CAT ATG GCAACACCCCGTCAA | GCGTC CAT GGC GCG CCG TCCTTGAAATTGCTCTTCG |
| CP6894P | GCGTC CCG GGT CAT ATG TATAAAAGATGTGTCGTAGA | GCGT CTC GAG GGATGTACTTAAGCACG |
| CP6900P | GCGTC CCG GGT CAT ATG AAGATAAAATTTTCTTGGAAG | GCGT AAG CTT GGGAAGACGATACCG |
| CP6952P | GCGTC CCG GGT CAT ATG CTCTCGGATCAATATATAGG | GCGT CTC GAG TCGAATTTCTTTTTTAGC |
| CP7034P | GCGTC CCG GGT CAT ATG AAAAAACAGGTATATCAATG | GCGT AAG CTT AAACGCTGAAATTATACC |
| CP7090P | GCGTC CCG GGT CAT ATC TGTAGCCTTTCCCCT | GCGT CTC GAG GCGTGCATGAATCTTA |
| CP7091P | GCGTC CCG GGT CAT ATC GAAGAATTAGAAGTTGTTGT | GCGT CTC GAG TAGTGTTCTCTTTATCGGT |
| CP7170P | GCGTC CCG GGT CAT ATG CTAGGGGCTGGAAACC | GCGT AAG CTT AAACTGCAGACCTGACG |
| CP7228P | GCGTC CCG GGT CAT ATG ACTGCTGTTCTTATTCTTACA | GCGT CTC GAG ATCTGAAAGCGGAGG |
| CP7249P | GCGTC CCG GGT CAT ATG ATCCCATCCCCTACC | GCGT CTC GAG ATCAGGTTGCTGAGACTT |
| CP7250P | GCGTC CCG GGT CAT ATG AATCTCAAACAGGTCT | GCGT CTC GAG ATTTTTTCTAGAGAGACTCTC |
| CP0018P | GTGCGT CATATG GCAACCACTCCACTAA | ACTCGCTA GCGGCCGC TAATGAGGTCCCCAG |
| CP6270P | GTGCGT CATATG AATTTATTAGGAGCTGCT | ACTCGCTA GCGGCCGC AAATTTGATTTTGCTACC |
| CP6735P | GTCGGT CATATG GCAGCACAAGTTGTATAT | ACTCGCTA GCGGCCGC TGGCGTAGAAGTCATC |
| CP6998P | GTCGGT CATATG TTGCCTGTAGGGAAC | ACTCGCTA GCGGCCGC GAATCTGAACTGACCAGA |
| CP7933P | GTGCGT CATATG GTTAATCCTATTGGTCCA | ACTCGCTA GCGGCCGC TTGGAGATAACCAGAATATA |
| CP7287P | GTGCGT CATATG TTACACAGCTCAGAACTAGA | ACTCGCTA GCGGCCGC GAAAATAATACGGATACCA |
| CP0010P | GTGCGT CATATG GCAACTGCTGAAAATATA | GCGT CTCGAG GAATTGGAACTTACCC |
| CP0468P | GTGCGT GCTAGC ATTTTTTATGACAAACTCTAT | GCGT CTCGAG AAATGTGCAATGACTCT |
| CP6272P | GTGCGT CATATG TTGACTCATCAAGAGGCT | GCGT CTCGAG GAAGGGAGGTTTTTTAGGT |
| CP6273P | GTGCGT CATATG ACATATCTGGAAGCTC | ACTCGCTA GCGGCCGC CTCCACAATTTTTATG |
| CP6362P | GTGCGT CATATC CCCTTTGATATTACTTATTATACA | GCGT CTCGAG TCGTTTCCAAATCCA |
| CP6372P | GTGCGT CATATG AAACAACACTATTCTCTAAATA | GCGT CTCGAG TTTCTDGTGGTTTTTCT |
| CP6390P | GTGCGT CATATG CGAGAGGTGCCTAAG | ACTCGCTA GCGGCCGC TCTCCTAGACAGCCTT |
| CP6402P | GTGCGT CATATG AATGTTGCGGATCTCCTTT | GCGT CTCGAG GAAGGGGTTGGCCGT |
| CP6446P | GTGCGT CATATG TGTAATCAAAAGCCCTCTT | GCGT CTCGAG GGGCTGAGGAGGAAC |
| CP6520P | GTGCGT GCTAGC AAACACTACCTATCATTTTCT | GCGT CTCGAG CAGAAAGGCTTTTCTTT |
| CP6577P | GTGCGT CATATG AATTTAGGCTATGTTAATTTA | GCGT CTCGAG GTTTTGTTTTTTGAAAGA |
| CP6602P | GTGCGT CATATC GCAGCATCAGGAGGCA | GCGT CTCGAG TGACCAAGGATAGGGTTTAG |
| CP6807P | GTGCGT CATATG CCTCGTGGTGACACTTT | GCGT CTCCAG CGCTGCTTCTTGCTC |
| CP6615P | GTGCGT CATATG TGCTCTCAAAAAACGACAA | GCGT CTCGAG TGAAGAGGCGCCATC |
| CP6624P | GTGCGT CATATG GATGCGAAAATGGGA | GCGT CTCGAG TCTTTGACATTCAAGAGC |
| CP6672P | GTGCGT CATATG ATTCCTACCATGTTAATG | GCGT CTCGAG GTCATACAATTTCCTTATATA |
| CP6679P | GTGCGT CATATG TGCACTCACTTAGGCT | GCGT CTCGAG CGAGTAGTTAGCACAAAC |
| CP6717P | CTGCCT GCTACG AACACAATCGTAGCTTCA | ACTCGCTA GCGGCCGC GGCTGGCATATAGGT |
| CP6784P | GTGCGT GCTAGC AAATCAAGATGTTCTATTGATA | GCGT CTCGAG TCCAAAACAACCCTCT |
| CP6802P | GTGCGT CATATG TGCGTAAGTTATATTAATTCCTT | GCGT CTCGAG CAGTCGGGCTTGTTG |
| CP6847P | GTGCGT CATATG TCGGATCTTTTACGAG | GCGT CTCGAG TTTTCTACACTGTTGTAATAAA |
| CP6884P | GTGCGT CATATG AATCAGCTGCTTTCT | GCGT CTCGAG AGAGAAGGTAATTGTACC |
| CP6886P | GTGCGT CATATG TGTCTACTTATTATCTATCTCTAC | GCGT CTCGAG TTCAGAAAAATGGCT |
| CP6890P | GTGCGT CATATG TCCCCACGACCACAA | GCGT CTCGAG TCCTGCAGCATTTAGC |
| CP6960P | GTGCGT CATATG TGTGACGTACGGTCTA | ACTCGCTA GCGGCCGC TTCACCTTGATTTCCT |
| CP6968P | GTGCGT CATATG TGCGATGCAAAAC | ACTCGCTA GCGGCCGC GGAGTATGCTTAGATATT |
| CP6969P | GTGCGT CATATC TCCTGTGGTTACTCTATT | ACTCGCTA GCGGCCGC AAAAAGGTCATAGTATACCT |
| CP7005P | GTGCGT CATATC AAAACTGTGATATTGAACA | GCGT CTCGAG CTGAGCTTCTATTTCTATTAT |
| CP7072P | GTGCGT CATATG CCCATTTATGGGAAA | GCGT CTCAG GTTGAGCAAAGGTTTG |
| CP7101P | GTGCGT CATATG TATTCGTGTTACAGCAA | GCGT CTCGAG GAAAAATTCTTTAGGGAG |
| CP7102P | GTGCGT CATATG GCCGCTAAAGCAAAT | GCGT CTCGAG TGAAAATGAAAGGATGGT |
| CP7105P | GTGCGT GCTAGC AGTCTATATCAAAAATGGTG | GCGT CTCGAG ATCTTTCATTTGGTTATCT |
| CP7106P | GTGCGT CATATG AAAGATTTGGGGACTCT | GCGT CTCGAG GAATCCTAAGGCATACCTA |
| CP7107P | GTGCGT GCTAGC AGTATAGTCAGAAATTCTGCA | GCGT CTCGAG GAAGCTAAGATTATAGCTACTTT |
| CP7108P | GTGCGT GCTAGC GCGGCCCTTTCCA | ACTCGCTA GCGGCCGC TTTATGTTATATGGAACAGATAGG |
| CP7109P | GTGCGT CATATG GGACATTTTATTGATATTG | ACTCGCTA GCGGCCGC ATCATCAAGGTAGATAAAG |
| CP7110P | GTGCGT CATATG GGTTATTGCTATGTAATTACA | GCGT CTCGAG TTCTGATTGGACTCCA |
| CP7127P | GTGCGT CATATG GTGGCTTTAACGATAGC | ACTCGCTA GCGGCCG GCAGCCATCGTATTC |
| CP7130P | GTGCGT CATATG TTCAATATGCGAGG | GCGT CTCGAG CTTCTTATTTGAACTTTG |
| CP7140P | GTGCGT CATATG ACAGCCGGAGCAGCT | GCGT CTCGAG AGCACCCTCAATTTCATTG |
| CP7182P | GTGCGT CATATG GGATATGTTTTCTATGTGATC | GCGT CTCGAG GCTACTAAATCGAATCGA |
| CP6262P | GTGCGT CATATG ATCCCTGGATTAAGTTCA | ACTCGCTA GCGGCCGC TTCACTGGGAGCTTGA |
| CP6269P | GTGCGT CATATG TACCAGGAGAATCTAAGAT | ACTCGCTA GCGGCCGC GATTTTCTTCTTCAGCTC |
| CP6298P | GTGCGT CATATG GAGGAGGTGTCTGAGTAT | ACTCGCTA GCGGCCGC ATGTTTCTTTTTACTCTTTCT |
| CP6419P | GTGCGT CATATG GCTCCAGTCCGTGTT | GCGT CTCCAG AAGTGTTCGTTGGAAGT |
| CP6601P | GTGCGT CATATG AATAAGCTACTCAATTTCGT | GCGT CTCGAG GAAAATCTGAATTCTTCCT |
| CP6639P | GTGCGT CATATG TTAAATTCAAGCAATTCA | GCGT CTCGAG AGGAACTAAAACCTCATCT |
| CP6664P | GTGCGT GCTAGC GTTTTATTTCATGCTCAA | ACTCGCTA GCGGCCGC CTTAGAAAGACTATTTTCTAAGTA |
| CP6696P | GTGCGT CATATG TGCGTGATAATGGG | GCGT CTCGAG ATTCATCTTCGTAAAGAT |
| CP6757P | GTGCGT CATATG GCAGTTGGTGGCGT | ACTCGCTA GCGGCCGC CTGTCCCTCTGGAGC |
| CP6790P | GTGCGT GCTAGC AGTGAACACAAAAAATCA | ACTCGCTA GCGGCCGC CTTATCGTCGTTATCAATA |
| CP6814P | GTGCGT CATATG CATGACGCACTTCTAAG | GCGT CTCGAG TACAGCTGCGCGA |
| CP6834P | GTGCGT CATATG GTTATGGGAACCTATATCG | GCGT CTCGAG TACATTTGTATTGATTTCAG |
| CP6878P | GTGCGT CATATG AACGTCCCTGATTCC | GCGT CTCCAG GCTAGCGGCTCTTTC |
| CP6892P | GTGCGT CATATG CAGAAGCATCCTTCCT | ACTCGCTA GCGGCCGC TCCTCTTTAGGAAATGG |
| CP6909P | GTGCGT CATATG TCCTCTTTAGGAAATGG | GCGT CTCGAG CAGTGCCAAGTAGGGA |
| CP7015P | GTGCGT CATATG GCAGTACGATTAATTGTTG | GCGT CTCGAG TTTATTGTAGTCTATTTTATATTTC |
| CP7035P | GTGCGT GCTAGC AGCAGAAAAGACAATGA | GCGT CTCGAG ATTTTGAGTGTCTTGCA |
| CP7073P | GTGCGT CATATG ATTACCATAAATCACGTG | GCGT CTCGAG TATCCATCGACTTATAGC |
| CP7085P | CTGCGT GCTAGC TGTATTTTCCCTTACGTA | ACTCGCTA GCGGCCGC GGATTCTGCATACTCTG |
| CP7092P | GTCCGT CATATG TCTCCTCTTCCTAAAAAA | GCGT CTCGAG GGATTCATTACTGACCA |
| CP7093P | GTGCGT CATATG AAATACCGCTTCACG | GCGT CTCGAG ATTCTCTAGGGCTACGT |
| CP7094P | GTGCGT CATATG GTACACTTCTCTCATAACCC | GCGT CTCGAG TAAGTTTGTATTGCGGTAT |
| CP7132P | GTGCGT CATATG TTGTTATTAGGGACTTTAGGA | GCGT CTCGAG TTTCCCAACCGCA |
| CP7133P | GTGCGT CATATG GCTGCCAATGCTC | GCGT CTCGAG TAATTTAATACTCTTTGAAGG |
| CP7177P | GTGCGT CATATG CCTACTCAACTTAAAACAGA | GCGT CTCCAG AAGTTTATATTTCAGCACTT |
| CP7184P | GTGCCT GCTAGC CATATAGGATTTTCCCA | GCGT CTCGAG GTACTTACCAAAGCGAT |
| CP7206P | GTGCGT GCTAGC AAGAACCTATATCACCCTA | GCGT CTCGAG CACACCGAGCAAAC |
| CP7222P | GTGCGT CATATG GTAGTTTCAGAACAAAAAGTC | GCGT CTCGAG ACGTATGCGCAACTG |
| CP7223P | GTGCGT CATATG GAAGTATTAGACCGCTCT | CCGT CTCGAG CGAGAAAAAGCTTCC |
| CP7224P | GTGCGT CATATG ATGAAGAAAATTCGAAA | ACTCGCTA GCGGCCGC TAAGCATTCACAAATGA |
| CP7225P | GTGCGT CATATG CATAGTTTGCTTCATCGT | GCGT CTCGAG TCTTTTAACTAAATCTTGTTCTT |
| CP7303P | GTGCGT CATATG CTTGTCTATTGTTTTGATCC | GCGT CTCCAG AAAATATACGGAACTCGC |
| CP7304P | GTGCGT GCTAGC GAAGTTTATAGTTTTTCCC | GCGT CTCGAG TTTTTGATTCCTTAAGAAG |
| CP7305P | GTGCGT CATATG GAAGTTTATAGTTTTCACCCT | GCGT CTCGAG ACTCCTTGAGAAGGGAA |
| CP7307P | GTGCGT CATATG CTTAATCATGCTIGAAGC | ACTCCCTA GCCGCCGC CTCTTTTATTTTAGGAAGCT |
| CP7342P | GTGCGT CATATG AAAAAAAAATTTATTTTCTACT | ACTCGCTA GCGGCCGC CACACTCTGTTCTTCTG |
| CP7347P | GTGCGT CATATG TTTTCTAAGGATTTGACTAA | GCGT CTCGAG CGAAGCAGAAGTCGT |
| CP7353P | GTGCGT CATATG AATATGCCTGTTCCTTCT | GCGT CTCGAG GGGGCGTAGGTTGTA |
| CP7193P | GTGCGT CATATG TGTTCCCTGGATCCT | ACTCGCTA GCGGCCGC AGTTATCACTATATCCACAAG |
| CP7248P | GTGCCT GCTAGC CTTGAACATTCTAAACAACAT | GCGT CTCGAC ACGTAGTTTAAGAGCAGACT |
| CP7261P | GTGCGT CATATG TGTCTATCTGCCTACATAG | GCGT CTCGAG TTTTGATGCTTCTTTCA |
| CP7280P | CTGCGT CATATC GACCAGAAAATTGAAAA | GCGT CTCGAG AGAGGTCTTCTGAGTGC |
| CP7302P | GTGCGT CATATG AATTTCCATTGTAGTGTAGT | GCGT CTCGAG GAACAGTTCGATTTGTG |
| CP73O6P | GTGCGT CATATG CTTCCTTTATCAGGGCA | ACTCGCGA GCGCCCGC TTCTTCAGGTTTCAGG |
| CP7367P | GTGCGT GCTAGC CGTTATGCCGACGTC | GCGT CTCGAG TTCGTGCATTTGGTG |
| CP7408P | GTGCGT CATATG TTGAAAATCCACAAAAA | GCGT CTCGAG ATTTTTCGGAAGAG |
| CP7409P | GTGCGT CATATG AGACCTTATCTTGTCATGGT | GCGT CTCGAG CCCTTTGCTCTTTACATAG |
| CP6733P | GTGCGT ACTAGT TGTCACCTACAGTCACTAG | GCGT CTCGAG GAATCGGAGTTTGGTA |
| CP6728P | GTGCGT ACTAGT AAGTCCTCTGTCTCTTGG | GCGT CTCGAG GAAACAAAACTTAGAGCCC |

[1321] TABLE III
Proteins with best results in FACS analysis

| | Molecular Weight (kDa) | | |
|---|---|---|---|
| cp number | Theoretical | Western Blot | Fusion type |
| 6260 | 97.5 | 94; 70 | GST |
| 6270 | 87.5 | — | GST |
| 6272 | 78.0 | 90 | GST |
| 6273 | 58.6 | 74; 64; 50 | GST |
| 6296 | 31.1 | — | GST |
| 6390 | 88.9 | 102 | GST |
| 6456 | 42.5 | 89; 6745 | GST |
| 6466 | 57.5 | 59; 56 | His |
| 6467 | 59.0 | 67 | GST |
| 6552 | 28.4 | 50; 27 | GST |
| 6576 | 86.0 | 79; 70; 62; 45 | GST |
| 6577 | 17.3 | 12 | GST |
| 6602 | 43.4 | 53; 42; 34 | GST |
| 6664 | 54.5 | 104; 45 | GST |
| 6696 | 47.9 | 95; 53 | GST |
| 6727 | 130.0-142.9 | 123; 61; 39 | His |
| 6729 | 94.8 | multiple bands | GST |
| 6731 | 95.5 | 97 | HST |
| 6733 | 97.1 | 104 | His |
| 6736 | 100.1 | 98; 93; 66; 60 | GST |
| 6737 | 101.2 | multiple bands | GST |
| 6751 | 100.2 | 95;71 | GST |
| 6752 | 102.1 | 97;48 | His |
| 6767 | 29.1 | 28 | GST |
| 6784 | 32.9 | 35 | GST |
| 6790 | 71.3 | multiple bands | His |
| 6802 | 29.7 | — | GST |
| 6814 | 29.6 | 28 | GST |
| 6830 | 177.4 | 174; 91; 13 | GST |
| 6849 | 57.3 | multiple bands | GST |
| 6850 | 7.4-9.4 | 61; 14; 8 | GST |
| 6854 | 42.2 | — | GST |
| 6878 | 40.4 | — | GST |
| 6900 | 28.0 | — | GST |
| 6960 | 25.6 | 75; 35 | GST |
| 6968 | 34.6 | 83; 53; 35 | GST |
| 6998 | 39.3 | multiple bands | GST |
| 7033 | 68.2 | multiple bands | GST |
| 7101 | 113 | 105 | GST |
| 7102 | 63.4 | — | GST |
| 7105 | 29.2 | 30 | GST |
| 7106 | 39.5 | 72;46 | GST |
| 7107 | 71.4 | 67;31 | His |
| 7108 | 35.9 | 35 | GST |
| 7111 | 46.1 | 51 | GST |
| 7132 | 17.9 | 57; 47; 17 | His |
| 7140 | 36.2-29.8 | 50; 38; 34 | GST |
| 7170 | 34.4 | 77;33 | GST |
| 7224 | 39.4 | 40 | GST |
| 7287 | 167.3 | 180 | GST |
| 7306 | 50.1 | 50 | GST |

[1322] TABLE V
FACS-positive proteins not found in C.trachomatis

| | |
|---|---|
| cp7105 | cp6390 |
| cp7106 | cp6784 |
| cp7107 | cp6296 |
| cp7108 | |

[1323] TABLE V
Proteins identified by MALDI-TOF following 2D electrophoresis

| | | |
|---|---|---|
| cp6270 | cp6733 | cp6900 |
| cp6552 | cp6736 | cp6960 |
| cp6576 | cp6737 | cp6998 |
| cp6577 | cp6752 | cp7033 |
| cp6602 | cp6767 | cp7108 |
| cp6664 | cp6784 | cp7111 |
| cp6727 | cp6790 | cp7170 |
| cp6728 | cp6830 | cp7287 |
| cp6729 | cp6849 | cp7306 |

The application's sequence listing, which the Patent Office published only in electronic form, follows.

SEQUENCE LISTING (664 sequences)

SEQ ID NO: 1 - protein, 272 aa, Chlamydia pneumoniae
MKKKLSLLVGLIFVLSSCHKEDAQNKIRIVASPTPHAELLESLQEEAKDLGIKLKILPVDDYRIPNRLLLDKQVDANYFQHQAFLDDECERYDCKGELVVIAKVHLEPQAIYSKKHSSLERLKSQKKLTIAIPVDRTNAQRALHLLEECGLIVCKGPANLNMTAKDVCGKENRSINILEVSAPLLVGSLPDVDAAVIPGNFAIAANLSPKKDSLCLEDLSVSKYTNLVVIRSEDVGSPKMIKLQKLFQSPSVQHFFDTKYHGNILTMTQDNG

SEQ ID NO: 2 - DNA, 819 bp, Chlamydia pneumoniae
atgaaaaaaaaattatcattacttgtaggtttaatttttgttttgagttcttgccataaggaagatgctcagaataaaatacgtattgtagccagtccgacacctcatgcggaattattggagagtttacaggaagaggctaaagatcttggaatcaagctgaaaatacttccagtagatgattatcgtattcctaatcgtttgcttttggataaacaagtagatgcaaattactttcaacatcaagcttttcttgatgacgaatgcgagcgttatgattgtaagggtgaattagttgttatcgctaaagttcatttggaacctcaagcaatttattctaagaaacattcttctttagagcgcttaaaaagccagaagaaactgactatagcgattcctgtggatcgtacgaatgctcagcgtgctctacacttgttagaagagtgcggactcattgtttgcaaagggcctgctaatttaaatatgacagctaaagatgtctgtgggaaagaaaatagaagtatcaacatattagaggtgtcagctcctcttcttgtcggatctcttcctgacgttgatgctgctgtcattcctggaaattttgctatagcagcaaacctttctccaaagaaagatagtctttgtttagaggatctttcggtatctaagtatacaaaccttgttgtcattcgttctgaagacgtaggttctcctaaaatgataaaattacagaagctgtttcaatctccttctgtacaacatttttttgatacaaaatatcatgggaatattttgacaatgactcaagacaatggttag

SEQ ID NO: 3 - protein, 973 aa, Chlamydia pneumoniae
MKTSIRKFLISTTLAPCFASTAFTVEVIMPSENFDGSSGKIFPYTTLSDPRGTLCIFSGDLYIANLDNAISRTSSSCFSNRAGALQILGKGGVFSFLNIRSSADGAAISSVITQNPELCPLSFSGFSQMIFDNCESLTSDTSASNVIPHASAIYATTPMLFTNNDSILFQYNRSAGFGAAIRGTSITIENTKKSLLFNGNGSISNGGALTGSAAINLINNSAPVIFSTNATGIYGGAIYLTGGSMLTSGNLSGVLFVNNSSRSGGAIYANGNVTFSNNSDLTFQNNTASPQNSLPAPTPPPTPPAVTPLLGYGGAIFCTPPATPPPTGVSLTISGENSVTFLENIASEQGGALYGKKISIDSNKSTIFLGNTAGKGGAIAIPESGELSLSANQGDILFNKNLSITSGTPTRNSIHFGKDAKFATLGATQGYTLYFYDPITSDDLSAASAAATVVVNPKASADGAYSGTIVFSGETLTATEAATPANATSTLNQKLELEGGTLALRNGATLNVHNFTQDEKSVVIMDAGTTLATTNGANNTDGAITLNKLVINLDSLDGTKAAVVNVQSTNGALTISGTLGLVKNSQDCCDNHGMFNKDLQQVPILELKATSNTVTTTDFSLGTNGYQQSPYGYQGTWEFTIDTTTHTVTGNWKKTGYLPHPERLAPLIPNSLWANVIDLRAVSQASAADGEDVPGKQLSITGITNFFHANHTGDARSYRHMGGGYLINTYTRITPDAALSLGFGQLFTKSKDYLVGHGHSNVYFATVYSNITKSLFGSSRFFSGGTSRVTYSRSNEKVKTSYTKLPKGRCSWSNNCWLGELEGNLPITLSSRILNLKQIIPFVKAEVAYATHGGIQENTPEGRIFGHGHLLNVAVPVGVRFGKNSHNRPDFYTIIVAYAPDVYRHNPDCDTTLPINGATWTSIGNNLTRSTLLVQASSHTSVNDVLEIFGHCGCDIRRTSRQYTLDIGSKLRF

SEQ ID NO: 4 - DNA, 2922 bp, Chlamydia pneumoniae
atgaaaacgtctattcgtaagttcttaatttctaccacactggcgccatgttttgcttcaacagcgtttactgtagaagttatcatgccttccgagaactttgatggatcgagtgggaagatttttccttacacaacactttctgatcctagagggacactctgtattttttcaggggatctctacattgcgaatcttgataatgccatatccagaacctcttccagttgctttagcaatagggcgggagcactacaaatcttaggaaaaggtggggttttctccttcttaaatatccgttcttcagctgacggagccgcgattagtagtgtaatcacccaaaatcctgaactatgtcccttgagtttttcaggatttagtcagatgatcttcgataactgtgaatctttgacttcagatacctcagcgagtaatgtcatacctcacgcatcggcgatttacgctacaacgcccatgctctttacaaacaatgactccatactattccaatacaaccgttctgcaggatttggagctgccattcgaggcacaagcatcacaatagaaaatacgaaaaagagccttctctttaatggtaatggatccatctctaatggaggggccctcacgggatctgcagcgatcaacctcatcaacaatagcgctcctgtgattttctcaacgaatgctacagggatctatggtggggctatttaccttaccggaggatctatgctcacctctgggaacctctcaggagtcttgttcgttaataatagctcgcgctcaggaggcgctatctatgctaacggaaatgtcacattttctaataacagcgacctgactttccaaaacaatacagcatctccacaaaactccttacctgcacctacacctccacctacaccaccagcagtcactcctttgttaggatatggaggcgccatcttctgtactcctccagctacccccccaccaacaggtgttagcctgactatatctggagaaaacagcgttacattcctagaaaacattgcctccgaacaaggaggagccctctatggcaaaaagatctctatagattctaataaatctacaatatttcttggaaatacagctggaaaaggaggcgctattgctattcccgaatctggggagctctctctatccgcaaatcaaggtgatatcctctttaacaagaacctcagcatcactagtgggacacctactcgcaatagtattcacttcggaaaagatgccaagtttgccactctaggagctacgcaaggctataccctatacttctatgatccgattacatctgatgatttatctgctgcatccgcagccgctactgtggtcgtcaatcccaaagccagtgcagatggtgcgtattcagggactattgtcttttcaggagaaaccctcactgctaccgaagcagcaacccctgcaaatgctacatctacattaaaccaaaagctagaacttgaaggcggtactctcgctttaagaaacggtgctaccttaaatgttcataacttcacgcaagatgaaaagtccgtcgtcatcatggatgcagggaccacattagcaactacaaatggagctaataatactgacggtgctatcaccttaaacaagcttgtaatcaatctggattctttggatggcactaaagcggctgtcgttaatgtgcagagtaccaatggagctctcactatatccggaactttaggacttgtgaaaaactctcaagattgctgtgacaaccacgggatgtttaataaagatttacagcaagttccgattttagaactcaaagcgacttcaaatactgtaaccactacggacttcagtctcggcacaaacggctatcagcaatctccctatgggtatcaaggaacttgggagtttaccatagacacgacaacccatacggtcacaggaaattggaaaaaaaccggttatcttcctcatccggagcgtcttgctcccctcattcctaatagcctatgggcaaacgtcatagatttacgagctgtaagtcaagcgtcagcagctgatggcgaagatgtccctgggaagcaactgagcatcacaggaattacaaatttcttccatgcgaatcataccggtgatgcacgcagctaccgccatatgggtggaggctacctcatcaatacctacacacgcatcactccagatgctgcgttaagtctaggttttggacagctgtttacaaaatctaaggattacctcgtaggtcacggtcattctaacgtttatttcgctacagtatactctaacatcaccaagtctctgtttggatcatcgagattcttctcaggaggcacttctcgagttacctatagccgtagcaatgagaaagtaaagacttcatatacaaaattgcctaaagggcgctgctcttggagtaacaattgctggttaggagaactcgaagggaaccttcccatcactctctcttctcgcatcttaaacctcaagcagatcattccctttgtaaaagctgaagttgcttacgcgactcatgggggcatccaagaaaatacccccgaggggaggatttttggacacggtcatctactcaacgttgcagttcccgtaggcgtccgctttggtaaaaattctcataatcgaccagatttttacactataatcgtagcctatgctcctgatgtctatcgtcacaatcctgattgcgatacgacattacctattaatggagctacgtggacctctatagggaataatctaaccagaagtactttgctagtacaagcatccagccatacttcagtaaatgatgttctagagatcttcgggcactgtggatgtgatattcgcagaacctcccgtcaatatactctagatataggaagcaaattacgattttaa

SEQ ID NO: 5 - protein, 938 aa, Chlamydia pneumoniae
MRFFCFGMLLPFTFVLANEGLQLPLETYITLSPEYQAAPQVGFTHNQNQDLAIVGNHNDFILDYKYYRSNGGALTCKNLLISENIGNVFFEKNVCPNSGGAIYAAQNCTISKNQNYAFTTNLVSDNPTATAGSLLGGALFAINCSITNNLGQGTFVDNLALNKGGALYTETNLSIKDNKGPIIIKQNRALNSDSLGGGIYSGNSLNIEGNSGAIQITSNSSGSGGGIFSTQTLTISSNKKLIEISENSAFANNYGSNFNPGGGGLTTTFCTILNNREGVLFNNNQSQSNGGAIHAKSIIIKENGPVYFLNNTATRGGALLNLSAGSGNGSFILSADNGDIIFNNNTASKHALNPPYRNAIHSTPNMNLQIGARPGYRVLFYDPIEHELPSSFPILFNFETGHTGTVLFSGEHVHQNFTDEMNFFSYLRNTSELRQGVLAVEDGAGLACYKFFQRGGTLLLGQGAVITTAGTIPTPSSTPTTVGSTITLNHIAIDLPSILSFQAQAPKIWIYPTKTGSTYTEDSNPTITISGTLTLRNSNNEDPYDSLDLSHSLEKVPLLYIVDVAAQKINSSQLDLSTLNSGEHYGYQGIWSTYWVETTTITNPTSLLGANTKHKLLYANWSPLGYRPHPERRGEFITNALWQSAYTALAGLHSLSSWDEEKGHAASLQGIGLLVHQKDKNGFKGFRSHMTGYSATTEATSSQSPNFSLGFAQFFSKAKEHESQNSTSSHHYFSGMCIENTLFKEWIRLSVSLAYMFTSEHTHTMYQGLLEGNSQGSFHNHTLAGALSCVFLPQPHGESLQIYPFITALAIRGNLAAFQESGDHAREFSLHRPLTDVSLPVGIRASWKNHHRVPLVWLTEISYRSTLYRQDPELHSKLLISQGTWTTQATPVTYNALGIKVKNTMQVFPKVTLSLDYSADISSSTLSHYLNVASRMRF

SEQ ID NO: 6 - DNA, 2817 bp, Chlamydia pneumoniae
atgcgctttttttgcttcggaatgttgcttccttttacttttgtattggctaatgaaggtctccaacttcctttggagacctatattacattaagtcctgaatatcaagcagcccctcaagtagggtttactcataaccaaaatcaagatctcgcaattgtcgggaatcacaatgatttcatcttggactataagtactatcggtcgaatggaggtgctcttacctgtaagaatcttctgatctctgaaaatatagggaatgtcttctttgagaagaatgtctgtcccaattctggcggggcaatttatgctgctcaaaattgcacgatctccaagaatcagaactatgcatttactacaaacttggtctctgacaatcctacagccactgcgggatcactattgggtggagctctctttgccataaattgctctattactaataacctaggacagggaactttcgttgacaatctcgctttaaataaggggggtgccctctatactgagacgaacttatctattaaagacaataaaggcccgatcataatcaagcagaatcgggcactaaattcggacagtttaggaggagggatttatagtgggaactctctaaatatagagggaaattctggagctatacagatcacaagcaactcttcaggatctgggggaggcatattttctacccaaacactcacgatctcctcgaataaaaaactcatagaaatcagtgaaaattccgcgttcgcaaataactatggatcgaacttcaatccaggaggaggaggtcttactaccaccttttgcacgatattgaacaaccgagaaggggtactctttaacaataaccaaagccagagcaacggtggagccattcatgcgaaatctatcattatcaaagaaaatggtcctgtatactttttaaataacactgcaactcggggaggggctctcctcaacttatcagcaggttctggaaacggaagcttcatcttatctgcagataatggagatattatctttaacaataatacggcctccaagcatgccctcaatcctccatacagaaacgccattcactcgactcctaatatgaatctgcaaataggagcccgtcccggctatcgagtgctgttctatgatcccatagaacatgagctcccttcctccttccccatactctttaatttcgaaaccggtcatacaggtacagttttattttcaggggaacatgtacaccagaactttaccgatgaaatgaatttcttttcctatttaaggaacacttcggaactacgtcaaggagtccttgctgttgaagatggtgcggggctggcctgctataagttcttccaacgaggaggcactctacttctaggtcaaggtgcggtgatcacgacagcaggaacgattcccacaccatcctcaacaccaacgacagtaggaagtactataactttaaatcacattgccattgaccttccttctattctttcttttcaagctcaggctccaaaaatttggatttaccccacaaaaacaggatctacctatactgaagattccaacccgacaatcacaatctcaggaactctcaccttacgcaacagcaacaacgaagatccctacgatagtctggatctctcgcactctcttgagaaagttccccttctttatattgtcgatgtcgctgcacaaaaaattaactcttcgcaactggatctatccacattaaattctggcgaacactatgggtatcaaggcatctggtcgacctattgggtagaaactacaacaatcacgaaccctacatctctactaggcgcgaatacaaaacacaagctgctctatgcaaactggtctcctctaggctaccgtcctcatcccgaacgtcgaggagaattcattacgaatgccttgtggcaatcggcatatacggctcttgcaggactccactccctctcctcctgggatgaagagaagggtcatgcagcttccctacaaggcattggtcttctggttcatcaaaaagacaaaaacggttttaagggatttcgtagtcatatgacaggttatagtgctaccaccgaagcaacctcttctcaaagtccgaatttctctttaggatttgctcagttcttctccaaagctaaagaacatgaatctcaaaatagcacgtcctctcaccactatttctctggaatgtgcatagaaaatactctcttcaaagagtggatacgtctatctgtgtctcttgcttatatgtttacctcggaacatacccatacaatgtatcagggtctcctggaagggaactctcagggatctttccacaaccataccttagcaggggctctctcctgtgttttcttacctcaacctcacggcgagtccctgcagatctatccctttattactgccttagccatccgaggaaatcttgctgcgtttcaagaatctggagaccatgctcgggaattttccctacaccgccccctaacggacgtctccctccctgtaggaatccgcgcttcttggaagaaccaccaccgagttcccctagtctggctcacagaaatttcctatcgctctactctctataggcaagatcctgaactccactcgaaattactgattagccaaggtacgtggacgacgcaggccactcctgtgacctacaatgctttagggatcaaagtgaaaaataccatgcaggtgtttcctaaagtcactctctccttagattactctgcggatatttcttcctccacgctgagtcactacttaaacgtggcgagtagaatgagattttaa

SEQ ID NO: 7 - protein, 934 aa, Chlamydia pneumoniae
MFGMTPAVYSLQTDSLEKFALERDEEFRTSFPLLDSLSTLTGFSPITTFVGNRHNSSQDIVLSNYKSIDNILLLWTSAGGAVSCNNFLLSNVEDHAFFSKNLAIGTGGAIACQGACTITKNRGPLIFFSNRGLNNASTGGETRGGAIACNGDFTISQNQGTFYFVNNSVNNWGGALSTNGHCRIQSNRAPLLFFNNTAPSGGGALRSENTTISDNTRPIYFKNNCGNNGGAIQTSVTVAIKNNSGSVIFNNNTALSGSINSGNGSGGAIYTTNLSIDDNPGTILFNNNYCIRDGGAICTQFLTIKNSGHVYFTNNQGNWGGALMLLQDSTCLLFAEQGNIAFQNNEVFLTTFGRYNAIHCTPNSNLQLGANKGYTTAFFDPIEHQHPTTNPLIFNPNANHQGTILFSSAYIPEASDYENNFISSSKNTSELRNGVLSIEDRAGWQFYKFTQKGGILKLGHAASIATTANSETPSTSVGSQVIINNLAINLPSILAKGKAPTLWIRPLQSSAPFTEDNNPTITLSGPLTLLNEENRDPYDSIDLSEPLQNIHLLSLSDVTARHINTDNFHPESLNATEHYGYQGIWSPYWVETITTTNNASIETANTLYRALYANWTPLGYKVNPEYQGDLATTPLWQSFHTMFSLLRSYNRTGDSDIERPFLEIQGIADGLFVHQNSIPGAPGFRIQSTGYSLQASSETSLHQKISLGFAQFFTRTKEIGSSNNVSAHNTVSSLYVELPWFQEAFATSTVLAYGYGDHHLHSLHPSHQEQAEGTCYSHTLAAAIGCSFPWQQKSYLHLSPFVQAIAIRSHQTAFEEIGDNPRKFVSQKPFYNLTLPLGIQGKWQSKFHVPTEWTLELSYQPVLYQQNPQIGVTLLASGGSWDILGHNYVRNALGYKVHNQTALFRSLDLFLDYQGSVSSSTSTHHLQAGSTLKF

SEQ ID NO: 8 - DNA, 2805 bp, Chlamydia pneumoniae
atgttcgggatgactcctgcagtgtatagtttacaaacggactcccttgaaaagtttgctttagagagggatgaagagtttcgtacgagctttcctctcttagactctctctccactcttacaggattttctccaataactacgtttgttggaaatagacataattcctctcaagacattgtactttctaactacaagtctattgataacatccttcttctttggacatcggctgggggagctgtgtcctgtaataatttcttattatcaaatgttgaagaccatgccttcttcagtaaaaatctcgcgattgggactggaggcgcgattgcttgccagggagcctgcacaatcacgaagaatagaggaccccttatttttttcagcaatcgaggtcttaacaatgcgagtacaggaggagaaactcgtgggggtgcgattgcctgtaatggagacttcacgatttctcaaaatcaagggactttctactttgtcaacaattccgtcaacaactggggaggagccctctccaccaatggacactgccgcatccaaagcaacagggcacctctactcttttttaacaatacagcccctagtggagggggtgcgcttcgtagtgaaaatacaacgatctctgataacacgcgtcctatttattttaagaacaactgtgggaacaatggcggggccattcaaacaagcgttactgttgcgataaaaaataactccgggtcggtgattttcaataacaacacagcgttatctggttcgataaattcaggaaatggttcaggaggggcgatttatacaacaaacctatccatagacgataaccctggaactattcttttcaataataactactgcattcgcgatggcggagctatctgtacacaatttttgacaatcaaaaatagtggccacgtatatttcaccaacaatcaaggaaactggggaggtgctcttatgctcctacaggacagcacctgcctactcttcgcggaacaaggaaatatcgcatttcaaaataatgaggttttcctcaccacatttggtagatacaacgccatacattgtacaccaaatagcaacttacaacttggagctaataaggggtatacgactgctttttttgatcctatagaacaccaacatccaactacaaatcctctaatctttaatcccaatgcgaaccatcagggaacgatcttattttcttcagcctatatcccagaagcttctgactacgaaaataatttcattagcagctcgaaaaatacctctgaacttcgcaatggtgtcctctctatcgaggatcgtgcgggatggcaattctataagttcactcaaaaaggaggtatccttaaattagggcatgcggcgagtattgcaacaactgccaactctgagactccatcaactagtgtaggctcccaggtcatcattaataaccttgcgattaacctcccctcgatcttagcaaaaggaaaagctcctaccttgtggatccgtcctctacaatctagtgctcctttcacagaggacaataaccctacaattactttatcaggtcctctgacactcttaaatgaggaaaaccgcgatccctacgacagtatagatctctctgagcctttacaaaacattcatcttctttctttatcggatgtaacagcacgtcatatcaataccgataactttcatcctgaaagcttaaatgcgactgagcattacggttatcaaggcatctggtctccttattgggtagagacgataacaacaacaaataacgcttctatagagacggcaaacaccctctacagagctctgtatgccaattggactcccttaggatataaggtcaatcctgaataccaaggagatcttgctacgactcccctatggcaatcctttcatactatgttctctctattaagaagttataatcgaactggtgattctgatatcgagaggcctttcttagaaattcaagggattgccgacggcctctttgttcatcaaaatagcatccccggggctccaggattccgtatccaatctacagggtattccttacaagcatcctccgaaacttctttacatcagaaaatctccttaggttttgcacagttcttcacccgcactaaagaaatcggatcaagcaacaacgtctcggctcacaatacagtctcttcactttatgttgagcttccgtggttccaagaggcctttgcaacatccacagtgttagcgtatggctatggggaccatcacctccacagcctacatccctcacatcaagaacaggcagaagggacgtgttatagccatacattagcagcagctatcggctgttctttcccttggcaacagaaatcctatcttcacctcagcccgttcgttcaggcaattgcaatacgttctcaccaaacagcgttcgaagagattggtgacaatccccgaaagtttgtctctcaaaagcctttctataatctgaccttacctctaggaatccaaggaaaatggcagtcaaaattccacgtacctacagaatggactctagaactttcttaccaaccggtactctatcaacaaaatccccaaatcggtgtcacgctacttgcgagcggaggttcctgggatatcctaggccataactatgttcgcaatgctttagggtacaaagtccacaatcaaactgcgctcttccgttctctcgatctattcttggattaccaaggatcggtctcctcctcgacatctacgcaccatctccaagcaggaagtaccttaaaattctaa

SEQ ID NO: 9 - protein, 90 aa, Chlamydia pneumoniae
MKKAVLIAAMFCGVVSLSSCCRIVDCCFEDPCAPSSCNPCEVIRKKERSCGGNACGSYVPSCSNPCGSTECNSQSPQVKGCTSPDGRCKQ

SEQ ID NO: 10 - DNA, 273 bp, Chlamydia pneumoniae
atgaagaaagctgttttaattgctgcaatgttttgtggagtagttagcttaagtagctgctgccgcattgtagattgttgttttgaggatccttgcgcaccctcttcttgcaatccttgtgaagtaataagaaaaaaagaaagatcttgcggcggtaatgcttgtgggtcctacgttccttcttgttctaatccatgtggttcaacagagtgtaactctcaaagcccacaagttaaaggttgtacatcacctgatggcagatgcaaacagtaa

SEQ ID NO: 11 - protein, 250 aa, Chlamydia pneumoniae
MKIKFSWKVNFLICLLAVGLIFFGCSRVKREVLVGRDATWFPKQFGIYTSDTNAFLNDLVSEINYKENLNINIVNQDWVHLFENLDDKKTQGAFTSVLPTLEMLEHYQFSDPILLTGPVLVVAQDSPYQSIEDLKGRLIGVYKFDSSVLVAQNIPDAVISLYQHVPIALEALTSNCYDALLAPVIEVTALIETAYKGRLKIISKPLNADGLRLAILKGTNGDLLEGFNAGLVKTRRSGKYDAIKQRYRLP

SEQ ID NO: 12 - DNA, 753 bp, Chlamydia pneumoniae
gtgaagataaaattttcttggaaggtaaattttttaatatgtttactggctgtgggactgatctttttcgggtgctctcgagtaaaaagagaagttctcgtaggtcgtgatgccacctggtttccaaaacaattcggcatttatacatccgataccaacgcatttttaaacgatcttgtttctgagattaactataaagagaatctaaatattaatattgtaaatcaagattgggtgcatctctttgagaatttagatgataaaaagacccaaggagcatttacatctgtattgcctactcttgagatgctcgaacactatcaattttctgatcccattttactcacaggtcctgtccttgtcgtcgctcaagactctccttaccaatctatagaggatcttaaaggtcgtcttattggagtgtataagtttgactcttcagttcttgtagctcaaaatatccctgacgctgtgattagcctctaccaacatgttccaatagcattggaagccttaacatcgaattgttacgacgctcttctagctcctgtaattgaagtgaccgcgctaatagaaacagcatataaaggaagactgaaaattatttcaaaacccttaaacgcagatggtttgcggcttgcaatactgaaagggacaaacggagatttgcttgaagggtttaacgcaggacttgtgaaaacacgacgctcaggaaaatacgatgctataaaacagcggtatcgtcttccctaa

SEQ ID NO: 13 - protein, 651 aa, Chlamydia pneumoniae
MVNPIGPGPIDETERTPPADLSAQGLEASAANKSAEAQRIAGAEAKPKESKTDSVERWSILRSAVNALMSLADKLGIASSNSSSSTSRSADVDSTTATAPTPPPPTFDDYKTQAQTAYDTIFTSTSLADIQAALVSLQDAVTNIKDTAATDEETAIAAEWETKNADAVKVGAQITELAKYASDNQAILDSLGKLTSFDLLQAALLQSVANNNKAAELLKEMQDNPVVPGKTPAIAQSLVDQTDATATQIEKDGNAIRDAYFAGQNASGAVENAKSNNSISNIDSAKAAIATAKTQIAEAQKKFPDSPILQEAEQMVIQAEKDLKNIKPADGSDVPNPGTTVGGSKQQGSSIGSIRVSMLLDDAENETASILMSGFRQMIHMFNTENPDSQAAQQELAAQARAAKAAGDDSAAAALADAQKALEAALGKAGQQQGILNALGQIASAAVVSAGVPPAAASSIGSSVKQLYKTSKSTGSDYKTQISAGYDAYKSINDAYGRARNDATRDVINNVSTPALTRSVPRARTEARGPEKTDQALARVISGNSRTLGDVYSQVSALQSVMQIIQSNPQANNEEIRQKLTSAVTKPPQFGYPYVQLSNDSTQKFIAKLESLFAEGSRTAAEIKALSFETNSLFIQQVLVNIGSLYSGYLQ

SEQ ID NO: 14 - DNA, 1956 bp, Chlamydia pneumoniae
atggttaatcctattggtccaggtcctatagacgaaacagaacgcacacctcccgcagatctttctgctcaaggattggaggcgagtgcagcaaataagagtgcggaagctcaaagaatagcaggtgcggaagctaagcctaaagaatctaagaccgattctgtagagcgatggagcatcttgcgttctgcagtgaatgctctcatgagtctggcagataagctgggtattgcttctagtaacagctcgtcttctactagcagatctgcagacgtggactcaacgacagcgaccgcacctacgcctcctccacccacgtttgatgattataagactcaagcgcaaacagcttacgatactatctttacctcaacatcactagctgacatacaggctgctttggtgagcctccaggatgctgtcactaatataaaggatacagcggctactgatgaggaaaccgcaatcgctgcggagtgggaaactaagaatgccgatgcagttaaagttggcgcgcaaattacagaattagcgaaatatgcttcggataaccaagcgattcttgactctttaggtaaactgacttccttcgacctcttacaggctgctcttctccaatctgtagcaaacaataacaaagcagctgagcttcttaaagagatgcaagataacccagtagtcccagggaaaacgcctgcaattgctcaatctttagttgatcagacagatgctacagcgacacagatagagaaagatggaaatgcgattagggatgcatattttgcaggacagaacgctagtggagctgtagaaaatgctaaatctaataacagtataagcaacatagattcagctaaagcagcaatcgctactgctaagacacaaatagctgaagctcagaaaaagttccccgactctccaattcttcaagaagcggaacaaatggtaatacaggctgagaaagatcttaaaaatatcaaacctgcagatggttctgatgttccaaatccaggaactacagttggaggctccaagcaacaaggaagtagtattggtagtattcgtgtttccatgctgttagatgatgctgaaaatgagaccgcttccattttgatgtctgggtttcgtcagatgattcacatgttcaatacggaaaatcctgattctcaagctgcccaacaggagctcgcagcacaagctagagcagcgaaagccgctggagatgacagtgctgctgcagcgctggcagatgctcagaaagctttagaagcggctctaggtaaagctgggcaacaacagggcatactcaatgctttaggacagatcgcttctgctgctgttgtgagcgcaggagttcctcccgctgcagcaagttctatagggtcatctgtaaaacagctttacaagacctcaaaatctacaggttctgattataaaacacagatatcagcaggttatgatgcttacaaatccatcaatgatgcctatggtagggcacgaaatgatgcgactcgtgatgtgataaacaatgtaagtacccccgctctcacacgatccgttcctagagcacgaacagaagctcgaggaccagaaaaaacagatcaagccctcgctagggtgatttctggcaatagcagaactcttggagatgtctatagtcaagtttcggcactacaatctgtaatgcagatcatccagtcgaatcctcaagcgaataatgaggagatcagacaaaagcttacatcggcagtgacaaagcctccacagtttggctatccttatgtgcaactttctaatgactctacacagaagttcatagctaaattagaaagtttgtttgctgaaggatctaggacagcagctgaaataaaagcactttcctttgaaacgaactccttgtttattcagcaggtgctggtcaatatcggctctctatattctggttatctccaataa

SEQ ID NO: 15 - protein, 354 aa, Chlamydia pneumoniae
MGIKGTGIIVWVDDATAKTKNATLTWTKTGYKPNPERQGPLVPNSLWGSFVDVRSIQSLMDRSTSSLSSSTNLWVSGIADFLHEDQKGNQRSYRHSSAGYALGGGFFTASENFFNFAFCQLFGYDKDHLVAKNHTHVYAGAMSYRHLGESKTLAKILSGNSDSLPFVFNARFAYGHTDNNMTTKYTGYSPVKGSWGNDAFGIECGGAIPVVASGRRSWVDTHTPFLNLEMIYAHQNDFKENGTEGRSFQSEDLFNLAVPVGIKFEKFSDKSTYDLSIAYVPDVIRNDPGCTTTLMVSGDSWSTCGTSLSRQALLVRAGNHHAFASNFEVFSQFEVELRGSSRSYAIDLGGRFGF

SEQ ID NO: 16 - DNA, 1065 bp, Chlamydia pneumoniae
atgggtatcaagggaactggaataattgtttgggtcgacgatgcaactgcaaaaacaaaaaatgctaccttaacttggactaaaacaggatacaagccgaatccagaacgtcagggacctttggttcctaatagcctgtggggttcttttgtcgatgtccgctccattcagagcctcatggaccggagcacaagttcgttatcttcgtcaacaaatttgtgggtatcaggaatcgcggactttttgcatgaagatcagaaaggaaaccaacgtagttatcgtcattctagcgcgggttatgcattaggaggaggattcttcacggcttctgaaaatttctttaattttgctttttgtcagctttttggctacgacaaggaccatcttgtggctaagaaccatacccatgtatatgcaggggcaatgagttaccgacacctcggagagtctaagaccctcgctaagattttgtcaggaaattctgactccctaccttttgtcttcaatgctcggtttgcttatggccataccgacaataacatgaccacaaagtacactggctattctcctgttaagggaagctggggaaatgatgccttcggtatagaatgtggaggagctatcccggtagttgcttcaggacgtcggtcttgggtggatacccacacgccatttctaaacctagagatgatctatgcacatcagaatgactttaaggaaaacggcacagaaggccgttctttccaaagtgaagacctcttcaatctagcggttcctgtagggataaaatttgagaaattctccgataagtctacgtatgatctctccatagcttacgttcccgatgtgattcgtaatgatccaggctgcacgacaactcttatggtttctggggattcttggtcgacatgtggtacaagcttgtctagacaagctcttcttgtacgtgctggaaatcatcatgcctttgcttcaaactttgaagttttcagtcagtttgaagtcgagttgcgaggttcttctcgtagctatgctatcgatcttggaggaagattcggattttaa

SEQ ID NO: 17 - protein, 177 aa, Chlamydia pneumoniae
MKSSFPKFVFSTFAIFPLSMIATETVLDSSASFDGNKNGNFSVRESQEDAGTTYLFKGNVTLENIPGTGTAITKSCFNNTKGDLTFTGNGNSLLFQTVDAGTVAGAAVNSSVVDKSTTFIGFSSLSFIASPGSSITTGKGAVSCSTGSLSLTKMSVCSSAKTFQRIMAVLSPQKLFH

SEQ ID NO: 18 - DNA, 534 bp, Chlamydia pneumoniae
atgaagtcttctttccccaagtttgtattttctacatttgctattttccctttgtctatgattgctaccgagacagttttggattcaagtgcgagtttcgatgggaataaaaatggtaatttttcagttcgtgagagtcaggaagatgctggaactacctacctatttaagggaaatgtcactctagaaaatattcctggaacaggcacagcaatcacaaaaagctgttttaacaacactaagggcgatttgactttcacaggtaacgggaactctctattgttccaaacggtggatgcagggactgtagcaggggctgctgttaacagcagcgtggtagataaatctaccacgtttatagggttttcttcgctatcttttattgcgtctcctggaagttcgataactaccggcaaaggagccgttagctgctctacgggtagcttgagtttgacaaaaatgtcagtttgctcttcagcaaaaacttttcaacggataatggcggtgctatcaccgcaaaaactctttcattaa

SEQ ID NO: 19 - protein, 746 aa, Chlamydia pneumoniae
MSALFSENTSSKKGGAIQTSDALTITGNQGEVSFSDNTSSDSGAAIFTEASVTISNNAKVSFIDNKVTGASSSTTGDMSGGAICAYKTSTDTKVTLTGNQMLLFSNNTSTTAGGAIYVKKLELASGGLTLFSRNSVNGGTAPKGGAIAIEDSGELSLSADSGDIVFLGNTVTSTTPGTNRSSIDLGTSAKMTALRSAAGRAIYFYDPITTGSSTTVTDVLKVNETPADSALQYTGNIIFTGEKLSETEAADSKNLTSKLLQPVTLSGGTLSLKHGVTLQTQAFTQQADSRLEMDVGTTLEPADTSTINNLVINISSIDGAKKAKIETKATSKNLTLSGTITLLDPTGTFYENHSLRNPQSYDILELKASGTVTSTAVTPDPIMGEKFHYGYQGTWGPIVWGTGASTTATFNWTKTGYIPNPERIGSLVPNSLWNAFIDISSLHYLMETANEGLQGDRAFWCAGLSNFFHKDSTKTRRGFRHLSGGYVIGGNLHTCSDKILSAAFCQLFGRDRDYFVAKNQGTVYGGTLYYQHNETYISLPCKLRPCSLSYVPTEIPVLFSGNLSYTHTDNDLKTKYTTYPTVKGSWGNDSFALEFGGRAPICLDESALFEQYMPFMKLQFVYAHQEGFKEQGTEAREFGSSRLVNLALPIGIRFDKESDCQDATYNLTLGYTVDLVRSNPDCTTTLRISGDSWKTFGTNLARQALVLRAGNHFCFNSNFEAFSQFSFELRGSSRNYNVDLGAKYQF

SEQ ID NO: 20 - DNA, 2241 bp, Chlamydia pneumoniae
atgtcagctctgttttctgaaaatacctcctcaaagaaaggcggagccattcagacttccgatgcccttaccattactggaaaccaaggggaagtctctttttctgacaatacttcttcggattctggagctgcaatttttacagaagcctcggtgactatttctaataatgctaaagtttcctttattgacaataaggtcacaggagcgagctcctcaacaacgggggatatgtcaggaggtgctatctgtgcttataaaactagtacagatactaaggtcaccctcactggaaatcagatgttactcttcagcaacaatacatcgacaacagcgggaggagctatctatgtgaaaaagctcgaactggcttccggaggacttaccctattcagtagaaatagtgtcaatggaggtacagctcctaaaggtggagccatagctatcgaagatagtggggaattgagtttatccgccgatagtggtgacattgtctttttagggaatacagtcacttctactactcctgggacgaatagaagtagtatcgacttaggaacgagtgcaaagatgacagctttgcgttctgctgctggtagagccatctacttctatgatcccataactacaggatcatccacaacagttacagatgtcttaaaagttaatgagactccggcagattctgcactacaatatacagggaacatcatcttcacaggagaaaagttatcagagacagaggccgcagattctaaaaatcttacttcgaagctactacagcctgtaactctttcaggaggtactctatctttaaaacatggagtgactctgcagactcaggcattcactcaacaggcagattctcgtctcgaaatggacgtaggaactactctagaacctgctgatactagcaccataaacaatttggtcattaacatcagttctatagacggtgcaaagaaggcaaaaatagaaaccaaagctacgtcaaaaaatctgactttatctggaaccatcactttattggacccgacgggcacgttttatgaaaatcatagtttaagaaatcctcagtcctacgacatcttagagctcaaagcttctggaactgtaacaagcaccgcagtgactccagatcctataatgggtgagaaattccattacggctatcagggaacttggggcccaattgtttgggggacaggggcttctacgactgcaaccttcaactggactaaaactggctatattcctaatcccgagcgtatcggctctttagtccctaatagcttatggaatgcatttatagatattagctctctccattatcttatggagactgcaaacgaagggttgcagggagaccgtgctttttggtgtgctggattatctaacttcttccataaggatagtacaaaaacacgacgcgggtttcgccatttgagtggcggttatgtcataggaggaaacctacatacttgttcagataagattcttagtgctgcattttgtcagctctttggaagagatagagactactttgtagctaagaatcaaggtacagtctacggaggaactctctattaccagcacaacgaaacctatatctctcttccttgcaaactacggccttgttcgttgtcttatgttcctacagagattcctgttctcttttcaggaaaccttagctacacccatacggataacgatctgaaaaccaagtatacaacatatcctactgttaaaggaagctgggggaatgatagtttcgctttagaattcggtggaagagctccgatttgcttagatgaaagtgctctatttgagcagtacatgcccttcatgaaattgcagtttgtctatgcacatcaggaaggttttaaagaacagggaacagaagctcgtgaatttggaagtagccgtcttgtgaatcttgccttacctatcgggatccgatttgataaggaatcagactgccaagatgcaacgtacaatctaactcttggttatactgtggatcttgttcgtagtaaccccgactgtacgacaacactgcgaattagcggtgattcttggaaaaccttcggtacgaatttggcaagacaagctttagtccttcgtgcagggaaccatttttgctttaactcaaattttgaagcctttagccaattttcttttgaattgcgtgggtcatctcgcaattacaatgtagacttaggagcaaaataccaattctaa

SEQ ID NO: 21 - protein, 395 aa, Chlamydia pneumoniae
LQDSQDYSFVKLSPGAGGTIITQDASQKPLEVAPSRPHYGYQGHWNVQVIPGTGTQPSQANLEWVRTGYLPNPERQGSLVPNSLWGSFVDQRAIQEIMVNSSQILCQERGVWGAGIANFLHRDKINEHGYRHSGVGYLVGVGTHAFSDATINAAFCQLFSRDKDYVVSKNHGTSYSGVVFLEDTLEFRSPQGFYTDSSSEACCNQVVTIDMQLSYSHRNNDMKTKYTTYPEAQGSWANDVFGLEFGATTYYYPNSTFLFDYYSPFLRLQCTYAHQEDFKETGGEVRHFTSGDLFNLAVPIGVKFERFSDCKRGSYELTLAYVPDVIRKDPKSTATLASGATWSTHGNNLSRQGLQLRLGNHCLINPGIEVFSHGAIELRGSSRNYNINLGGKYRF

SEQ ID NO: 22 - DNA, 1188 bp, Chlamydia pneumoniae
ttgcaagactctcaagactatagctttgtaaagttatctccaggagcgggagggactataattactcaagatgcttctcagaagcctcttgaagtagctccttctagaccacattatggctatcaaggacattggaatgtgcaagtcatcccaggaacgggaactcaaccgagccaggcaaatttagaatgggtgcggacaggataccttccgaatcccgaacggcaaggatctttagttcccaatagcctgtggggttcttttgttgatcagcgtgctatccaagaaatcatggtaaatagtagccaaatcttatgtcaggaacggggagtctggggagctggaattgctaatttcctacatagagataaaattaatgagcacggctatcgccatagcggtgtcggttatcttgtgggagttggcactcatgctttttctgatgctacgataaatgcggctttttgccagctcttcagtagagataaagactacgtagtatccaaaaatcatggaactagctactcaggggtcgtatttcttgaggataccctagagtttagaagtccacagggattctatactgatagctcctcagaagcttgctgtaaccaagtcgtcactatagatatgcagttgtcttacagccatagaaataatgatatgaaaaccaaatacacgacatatccagaagctcagggatcttgggcaaatgatgtttttggtcttgagtttggagcgactacatactactaccctaacagtacttttttatttgattactactctccgtttctcaggctgcagtgcacctatgctcaccaggaagacttcaaagagacaggaggtgaggttcgtcactttactagcggagatcttttcaatttagcagttcctattggcgtgaagtttgagagattttcagactgtaaaaggggatcttatgaacttacccttgcttatgttcctgatgtgattcgcaaagatcccaagagcacggcaacattggctagtggagctacgtggagcacccacggaaacaatctctccagacaaggattacaactgcgtttagggaaccactgtctcataaatcctggaattgaggtgttcagtcacggagctattgaattgcggggatcctctcgtaattataacatcaatctcgggggtaaataccgattttaa

SEQ ID NO: 23 - protein, 532 aa, Chlamydia pneumoniae
MRKISVGICITILLSLSVVLQGCKESSHSSTSRGELAINIRDEPRSLDPRQVRLLSEISLVKHIYEGLVQENNLSGNIEPALAEDYSLSSDGLTYTFKLKSAFWSNGDPLTAEDFIESWKQVATQEVSGIYAFALNPIKNVRKIQEGHLSIDHFGVHSPNESTLVVTLESPTSHFLKLLALPVFFPVHKSQRTLQSKSLPIASGAFYPKNIKQKQWIKLSKNPHYYNQSQVETKTITIHFIPDANTAAKLFNQGKLNWQGPPWGERIPQETLSNLQSKGHLHSFDVAGTSWLTFNINKFPLNNMKLREALASALDKEALVSTIFLGRAKTADHLLPTNIHSYPEHQKQEMAQRQAYAKKLFKEALEELQITAKDLEHLNLIFPVSSSASSLLVQLIREQWKESLGFAIPIVGKEFALLQADLSSGNFSLATGGWFADFADPMAFLTIFAYPSGVPPYAINHKDFLEILQNIEQEQDHQKRSELVSQASLYLETFHIIEPIYHDAFQFAMNKKLSNLGVSPTGVVDFRYAKEN

SEQ ID NO: 24 - DNA, 1599 bp, Chlamydia pneumoniae
atgcgcaagatatcagtgggaatctgtatcaccattctccttagcctctccgtagtcctccaaggctgcaaggagtccagtcactcctctacatctcggggagaactcgctattaatataagagatgaaccccgttctttagatccaagacaagtgcgacttctttcagaaatcagccttgtcaaacatatctatgagggattagttcaagaaaataatctttcaggaaatatagagcctgctcttgcagaagactactctctttcctcggacggactcacttatacttttaaactgaaatcagctttttggagtaatggcgaccccttaacagctgaagactttatagaatcttggaaacaagtagctactcaagaagtctcaggaatctatgcttttgccttgaatccaattaaaaatgtacgaaagatccaagagggacacctctccatagaccattttggagtgcactctcctaatgaatctacacttgttgttaccctggaatccccaacctcgcatttcttaaaacttttagctcttccagtctttttccccgttcataaatctcaaagaaccctgcaatccaaatctctacctatagcaagcggagctttctatcctaaaaatatcaaacaaaaacaatggataaaactctcaaaaaaccctcactactataatcaaagtcaggtggaaactaaaacgattacgattcacttcattcccgatgcaaacacagcagcaaaactatttaatcagggaaaactcaattggcaaggacctccttggggagaacgcattcctcaagaaaccctatccaatttacagtctaaggggcacttacactcttttgatgtcgcaggaacctcatggctcaccttcaatatcaataaattccccctcaacaatatgaagcttagagaagccttagcatcagccttagataaggaagctcttgtctcaactatattcttaggccgtgcaaaaactgccgatcatctcctacctacaaatattcatagctatcccgaacatcaaaaacaagagatggcacaacgccaagcttacgctaaaaaactctttaaagaagctttagaagaactccaaatcactgctaaagatctcgaacatcttaatcttatctttcccgtttcctcgtcagcaagttctttactagtccaacttatacgagaacagtggaaagaaagtttagggttcgctatccctattgtcggaaaggaatttgctcttctccaagcagacctatcttcagggaacttctctttagctacaggaggatggttcgcagactttgctgatcctatggcatttctaacgatctttgcttatccatcaggagttcctccttatgcaatcaaccataaggacttcctagaaattctacaaaacatagaacaagagcaagatcaccaaaaacgctcggaattagtgtcgcaagcttctctttacctagagacctttcatattattgagccgatctaccacgacgcatttcaatttgctatgaataaaaaactttctaatctaggagtctcaccaacaggagttgtggacttccgttatgctaaggaaaattag

SEQ ID NO: 25 - protein, 435 aa, Chlamydia pneumoniae
MFSRWITLFLLFISLTGCSSYSSKHKQSLIIPIHDDPVAFSPEQAKRAMDLSIAQLLFDGLTRETHRESNDLELAIASRYTVSEDFCSYTFFIKDSALWSDGTPITSEDIRNAWEYAQENSPHIQIFQGLNFSTPSSNAITIHLDSPNPDFPKLLAFPAFAIFKPENPKLFSGPYTLVEYFPGHNIHLKKNPNYYDYHCVSINSIKLLIIPDIYTAIHLLNRGKVDWVGQPWHQGIPWELHKQSQYHYYTYPVEGAFWLCLNTKSPHLNDLQNRHRLATCIDKRSIIEEALQGTQQPAETLSRGAPQPNQYKKQKPLTPQEKLVLTYPSDILRCQRIAEILKEQWKAAGIDLILEGLEYHLFVNKRKVQDYAIATQTGVAYYPGANLISEEDKLLQNFEIIPIYYLSYDYLTQDFIEGVIYNASGAVDLKYTYFP

SEQ ID NO: 26 - DNA, 1308 bp, Chlamydia pneumoniae
atgttttcacgatggatcaccctctttttattattcattagccttactggatgctcctcctactcttcaaaacataaacaatctttaattattcccatacatgacgaccctgtagctttttctcctgaacaagcaaaacgggccatggacctttctattgcccaacttctttttgatggtctgactagagaaactcatcgcgaatccaatgatttggaattagcgattgccagtcgctatacagtctctgaagacttttgctcttatacgttctttatcaaagacagcgctttatggagcgacggaacaccaatcacctccgaagatatccgtaacgcttgggagtatgcacaggagaactctccccacatacagatcttccaaggacttaacttctcaactccttcatcaaatgcaattacgattcatctcgactcgcccaaccccgattttcctaagcttcttgcctttcctgcatttgctatctttaaaccagaaaacccgaagctctttagcggtccgtatactcttgtagagtatttcccagggcataacattcatttaaagaaaaaccctaactattacgactaccactgcgtctccatcaactccatcaaactgctcattattcctgatatatatacagccatccacctcctaaacagaggcaaggtggactgggtaggacaaccctggcatcaagggattccttgggagctccataaacaatcgcaatatcactactacacctatcctgtagaaggtgccttctggctttgtctaaatacaaaatccccacacttaaatgatcttcaaaacagacatagactcgctacttgtattgataaacgttctatcattgaagaagctcttcaaggaacccaacaaccagcggaaacactgtcccgaggagctccacaaccaaatcaatataaaaaacaaaagcctctaactccacaagaaaaactcgtgcttacctatccctcagatattctaagatgccaacgcatagcagaaatcttaaaggaacaatggaaagctgctggaatagatttaatccttgaaggactcgaataccatctgtttgttaacaaacgaaaagtccaagactacgccatagcaacacagactggagttgcttattacccaggagcaaatctaatttctgaagaagacaagctcctgcaaaactttgagattatcccgatctactatctgagctatgactatctcactcaagattttatagagggagtaatctataatgcttctggagctgtagatctcaaatatacctatttcccctag

SEQ ID NO: 27 - protein, 528 aa, Chlamydia pneumoniae
MKMHRLKPTLKSLIPNLLFLLLTLSSCSKQKQEPLGKHLVIAMSHDLADLDPRNAYLSRDASLAKALYEGLTRETDQGIALALAESYTLSKDHKVYTFKLRPSVWSDGTPLTAYDFEKSIKQLYFEEFSPSIHTLLGVIKNSSAIHNAQKSLETLGIQAKDDLTLVITLEQPFPYFLTLIARPVFSPVHHTLRESYKKGTPPSTYISNGPFVLKKHEHQNYLILEKNPHYYDHESVKLDRVTLKIIPDASTATKLFKSKSIDWIGSPWSAPISNEDQKVLSQEKILTYSVSSTTLLIYNLQKPLIQNKALRKAIAHAIDRKSILRLVPSGQEAVTLVPPNLSQLNLQKEISTEERQTKARAYFQEAKETLSEKELAELSILYPIDSSNSSIIAQEIQRQLKDTLGLKIKIQGMEYHCFLKKRRQGDFFIATGGWIAEYVSPVAFLSILGNPRDLTQWRNSDYEKTLEKLYLPHAYKENLKRAEMIIEEETPIIPLYHGKYIYAIHPKIQNTFGSLLGHTDLKNIDILS

SEQ ID NO: 28 - DNA, 1587 bp, Chlamydia pneumoniae
atgaagatgcataggcttaaacctaccttaaaaagtctgatccctaatcttcttttcttattgctcactctttcaagctgctcaaagcaaaaacaagaacccttaggaaaacatctcgttattgcgatgagccatgatctcgccgacctagatcctcgcaatgcctatttaagcagagatgcttccctagcaaaagccctctatgaaggactgacaagagaaactgatcaaggaatcgcactggctcttgcagaaagttataccctgtcaaaagatcataaggtctatacctttaaactcagaccttctgtgtggagcgatggcactccactcactgcttatgactttgaaaaatctataaaacaactgtacttcgaagaattttcaccttccatacatactttactcggcgtgattaaaaattcttcggcaatccacaatgctcaaaaatctctggaaactcttgggatacaggcaaaagatgatcttactttggtgattaccctagagcaacctttcccatactttctcacacttatcgctcgccccgtattctcccctgttcatcacacccttagggaatcctataagaaaggaacacccccatccacatacatctccaatgggccctttgtcttaaaaaaacatgaacaccaaaactacttaattttagaaaaaaatcctcactactatgatcatgaatcagtaaagttagaccgagtcaccttaaaaattatcccagacgcctccacagccacgaaacttttcaaaagtaaatctatagattggattggctcaccttggagcgctccgatatctaacgaagaccaaaaagttctctcccaagaaaagattcttacctattctgtttcaagcaccacccttcttatctataacctgcaaaaacctctaatacaaaataaagccctcaggaaagccattgctcatgctattgatagaaaatctatcttaagactcgtgccttcaggacaagaagctgtaactctagttcccccaaatctttcacaactcaatcttcaaaaagagatctcaacagaagaacgacaaacaaaagccagagcatattttcaagaagctaaagaaacactttctgaaaaagaactcgcagaactcagcatcctctatcctatagattcctcgaattcctccatcatagctcaagaaatccaaagacaacttaaagataccttaggattgaaaatcaaaatccaaggcatggagtaccactgctttttaaagaaacgtcgtcaaggagatttcttcatagcgacaggaggatggattgcggaatacgtaagccccgtagccttcctatctattctaggcaaccccagagacctcacacaatggagaaacagtgattacgaaaagactttagagaaactctatctccctcatgcctacaaagagaatttaaaacgcgcagaaatgataatagaagaagaaaccccgattatccccctgtatcacggcaaatatatttacgctatacatcctaaaatccagaatacattcggatctcttctaggccacacagatctcaaaaatatcgatatcttaagttag

SEQ ID NO: 29 - protein, 399 aa, Chlamydia pneumoniae
MAASGGTGGLGGTQGVNLAAVEAAAAKADAAEVVASQEGSEMNMIQQSQDLTNPAAATRTKKKEEKFQTLESRKKGEAGKAEKKSESTEEKPDTDLADKYASGNSEISGQELRGLRDAIGDDASPEDILALVQEKIKDPALQSTALDYLVQTTPPSQGKLKEALIQARNTHTEQFGRTAIGAKNILFASQEYADQLNVSPSGLRSLYLEVTGDTHTCDQLLSMLQDRYTYQDMAIVSSFLMKGMATELKRQGPYVPSAQLQVLMTETRNLQAVLTSYDYFESRVPILLDSLKAEGIQTPSDLNFVKVAESYHKIINDKFPTASKVEREVRNLIGDDVDSVTGVLNLFFSALRQTSSRLFSSADKRQQLGAMIANALDAVNINNEDYPKASDFPKPYPWS

SEQ ID NO: 30 - DNA, 1200 bp, Chlamydia pneumoniae
atggcagcatcaggaggcacaggtggtttaggaggcactcagggtgtcaaccttgcagctgtagaagctgcagctgcaaaagcagatgcagcagaagttgtagccagccaagaaggttctgagatgaacatgattcaacaatctcaggacctgacaaatcccgcagcagcaacacgcacgaaaaaaaaggaagagaagtttcaaactctagaatctcggaaaaaaggagaagctggaaaggctgagaaaaaatctgaatctacagaagagaagcctgacacagatcttgctgataagtatgcttctgggaattctgaaatctctggtcaagaacttcgcggcctgcgtgatgcaataggagacgatgcttctccagaagacattcttgctcttgtacaagagaaaattaaagacccagctctgcaatccacagctttggactacctggttcaaacgactccaccctcccaaggtaaattaaaagaagcgcttatccaagcaaggaatactcatacggagcaattcggacgaactgctattggtgcgaaaaacatcttatttgcctctcaagaatatgcagaccaactgaatgtttctccttcagggcttcgctctttgtacttagaagtgactggagacacacatacctgtgatcagctactttctatgcttcaagaccgctatacctaccaagatatggctattgtcagctcctttctaatgaaaggaatggcaacagaattaaaaaggcagggtccctacgtacccagtgcgcaactacaagttctcatgacagaaactcgtaacctgcaagcagttcttacctcgtacgattactttgaaagtcgcgttcctattttactcgatagcttaaaagctgagggaatccaaactccttctgatctaaactttgtgaaggtagctgagtcctaccataaaatcattaacgataagttcccaacagcatctaaagtagaacgagaagtccgcaatctcataggagacgatgttgattctgtgaccggtgtcttgaacttattcttttctgctttacgtcaaacgtcgtcacgccttttctcttcagcagacaaacgtcagcaattaggagctatgattgctaatgctttagatgctgtaaatataaacaatgaagattatcccaaagcatcagacttccctaaaccctatccttggtcatga

SEQ ID NO: 31 - protein, 1407 aa, Chlamydia pneumoniae
MKYSLPWLLTSSALVFSLHPLMAANTDLSSSDNYENGSSGSAAFTAKETSDASGTTYTLTSDVSITNVSAITPADKSCFTNTGGALSFVGADHSLVLQTIALTHDGAAINNTNTALSFSGFSSLLIDSAPATGTSGGKGAICVTNTEGGTATFTDNASVTLQKNTSEKDGAAVSAYSIDLAKTTTAALLDQNTSTKNGGALCSTANTTVQGNSGTVTFSSNTATDKGGGIYSKEKDSTLDANTGVVTFKSNTAKTGGAWSSDDNLALTGNTQVLFQENKTTGSAAQANNPEGCGGAICCYLATATDKTGLAISQNQEMSFTSNTTTANGGAIYATKCTLDGNTTLTFDQNTATAGCGGAIYTETEDFSLKGSTGTVTFSTNTAKTGGALYSKGNSSLTGNTNLLFSGNKATGPSNSSANQEGCGGAILAFIDSGSVSDKTGLSIANNQEVSLTSNAATVSGGAIYATKCTLTGNGSLTFDGNTAGTSGGAIYTETEDFTLTGSTGTVTFSTNTAKTGGALYSKGNNSLSGNTNLLFSGNKATGPSNSSANQEGCGGAILSFLESASVSTKKGLWIEDNENVSLSGNTATVSGGAIYATKCALHGNTTLTFDGNTAETAGGAIYTETEDFTLTGSTGTVTFSTNTAKTAGALHTKGNTSFTKNKALVFSGNSATATATTTTDQEGCGGAILCNISESDIATKSLTLTENESLSFINNTAKRSGGGIYAPKCVISGSESINFDGNTAETSGGAIYSKNLSITANGPVSFTNNSGGKGGAIYIADSGELSLEAIDGDITFSGNRATEGTSTPNSIHLGAGAKITKLAAAPGHTIYFYDPITMEAPASGGTIEELVINPVVKAIVPPPQPKNGPIASVPVVPVAPANPNTGTIVFSSGKLPSQDASIPANTTTILNQKINLAGGNVVLKEGATLQVYSFTQQPDSTVFMDAGTTLETTTTNNTDGSIDLKNLSVNLDALDGKRMITIAVNSTSGGLKISGDLKFHNNEGSFYDNPGLKANLNLPFLDLSSTSGTVNLDDFNPIPSSMAAPDYGYQGSWTLVPKVGAGGKVTLVAEWQALGYTPKPELRATLVPNSLWNAYVNIHSIQQEIATAMSDAPSHPGIWIGGIGNAFHQDKQKENAGFRLISRGYIVGGSMTTPQEYTFAVAFSQLFGKSKDYVVSDIKSQVYAGSLCAQSSYVIPLHSSLRRHVLSKVLPELPGETPLVLHGQVSYGRNHHNMTTKLANNTQGKSDWDSHSFAVEVGGSLPVDLNYRYLTSYSPYVKLQVVSVNQKGFQEVAADPRIFDASHLVNVSIPMGLTFKHESAKPPSALLLTLGYAVDAYRDHPHCLTSLTNGTSWSTFATNLSRQAFFAEASGHLKLLHGLDCFASGSCELRSSSRSYNANCGTRYSF

SEQ ID NO: 32 - DNA, 4224 bp, Chlamydia pneumoniae
atgaaatattctttaccttggctacttacctcttcggctttagttttctccctacatccactaatggctgctaacacggatctctcatcatccgataactatgaaaatggtagtagtggtagcgcagcattcactgccaaggaaacttcggatgcttcaggaactacctacactctcactagcgatgtttctattacgaatgtatctgcaattactcctgcagataaaagctgttttacaaacacaggaggagcattgagttttgttggagctgatcactcattggttctgcaaaccatagcgcttacgcatgatggtgctgcaattaacaataccaacacagctctttctttctcaggattctcgtcactcttaatcgactcagctccagcaacaggaacttcgggcggcaagggtgctatttgtgtgacaaatacagagggaggtactgcgacttttactgacaatgccagtgtcaccctccaaaaaaatacttcagaaaaagatggagctgcagtttctgcctacagcatcgatcttgctaagactacgacagcagctctcttagatcaaaatactagcacaaaaaatggcggggccctctgtagtacagcaaacactacagtccaaggaaactcaggaacggtgaccttctcctcaaatactgctacagataaaggtggggggatctactcaaaagaaaaggatagcacgctagatgccaatacaggagtcgttaccttcaaatctaatactgcaaagacggggggtgcttggagctctgatgacaatcttgctcttaccggcaacactcaagtactttttcaggaaaataaaacaaccggctcagcagcacaggcaaataacccggaaggttgtggtggggcaatctgttgttatcttgctacagcaacagacaaaactggattagccatttctcagaatcaagaaatgagcttcactagtaatacaacaactgcgaatggtggagcgatctacgctactaaatgtactctggatggaaacacaactcttaccttcgatcagaatactgcgacagcaggatgtggcggagctatctatacagaaactgaagatttttctcttaagggaagtacgggaaccgtgaccttcagcacaaatacagcaaagacaggcggcgccttatattctaaaggaaacagctcgctgactggaaataccaacctgctcttttcagggaacaaagctacgggcccgagtaattcttcagcaaatcaagagggttgcggtggggcaatcctagcctttattgattcaggatccgtaagcgataaaacaggactatcgattgcaaacaaccaagaagtcagcctcactagtaatgctgcaacagtaagtggtggtgcgatctatgctaccaaatgtactctaactggaaacggctccctgacctttgacggcaatactgctggaacttcaggaggggcgatctatacagaaactgaagattttactcttacaggaagtacaggaaccgtgaccttcagcacaaatacagcaaagacaggcggcgccttatattctaaaggcaacaactctctgtctggtaataccaacctgctcttttcagggaacaaagctacgggcccgagtaattcttcagcaaatcaagagggttgcggtggggcaatcctatcgtttcttgagtcagcatctgtaagtactaaaaaaggactctggattgaagataacgaaaacgtgagtctctctggtaatactgcaacagtaagtggcggtgcgatctatgcgaccaagtgtgctctgcatggaaacacgactcttacctttgatggcaatactgccgaaactgcaggaggagcgatctatacagaaaccgaagattttactcttacgggaagtacgggaaccgtgaccttcagcacaaatacagcaaagacagcaggggctctacatactaaaggaaatacttcctttaccaaaaataaggctcttgtattttctggaaattcagcaacagcaacagcaacaacaactacagatcaagaaggttgtggtggagcgatcctctgtaatatctcagagtctgacatagctacaaaaagcttaactcttactgaaaatgagagtttaagtttcattaacaatacggcaaaaagaagtggtggtggtatttatgctcctaagtgtgtaatctcaggcagtgaatccataaactttgatggcaatactgctgaaacttcgggaggagcgatttattcgaaaaacctttcgattacagctaacggtcctgtctcctttaccaataattctggaggcaagggaggcgccatttatatagccgatagcggagaactttccttagaggctattgatggggatattactttctcagggaaccgagcgactgagggaacttcaactcccaactcgatccatttaggtgcaggggctaagatcactaagcttgcagcagctcctggtcatacgatttatttttatgatcctattacgatggaagctcctgcatctggaggaacaatagaggagttagtcatcaatcctgttgtcaaagctattgttcctcctccccaaccaaaaaatggtcctatagcttcagtgcctgtagtccctgtagcacctgcaaacccaaacacgggaactatagtattttcttctggaaaactccccagtcaagatgcctcgattcctgcaaatactaccaccatactgaaccagaagatcaacttagcaggaggaaatgtcgttttaaaagaaggagccaccctacaagtatattccttcacacagcagcctgattctacagtattcatggatgcaggaacgaccttagagaccacgacaactaacaatacagatggcagcatcgatctaaagaatctctctgtaaatctggatgctttagatggcaagcgtatgataacgattgccgtaaacagcacaagtgggggattaaaaatctcaggggatctgaaattccataacaatgaaggaagtttctatgacaatcctgggttgaaagcaaacttaaatcttcctttcttagatctttcttctacttcaggaactgtaaatttagacgacttcaatccgattccttctagcatggctgctccggattatgggtatcaagggagttggactctggttcctaaagtaggagctggagggaaggtgactttggtcgcggaatggcaagcgttaggatacactcctaaaccagagcttcgtgcgactttagttcctaatagcctttggaatgcttatgtaaacatccattctatacagcaggagatcgccactgcgatgtcggacgctccctcacatccagggatttggattggaggtattggcaacgccttccatcaagacaagcaaaaggaaaatgcaggattccgtttgatttccagaggttatattgttggtggcagcatgaccacccctcaagaatatacctttgctgttgcattcagccaactctttggcaaatctaaggattacgtagtctcggatattaaatctcaagtctatgcaggatctctctgtgctcagagctcttatgtcattcccctgcatagctcattacgtcgccacgtcctctctaaggtccttccagagctcccaggagaaactccccttgttctccatggtcaagtttcctatggaagaaaccaccataatatgacgacaaagcttgcgaacaacacacaagggaaatcagactgggacagccatagcttcgctgttgaagtcggtggttctcttcctgtagatctaaactacagataccttaccagctactctccctatgtgaaactccaagttgtgagtgtaaatcaaaaaggattccaagaggttgctgctgatccacgtatctttgacgctagccatctggtcaacgtgtctatccctatgggactcaccttcaaacacgaatcagcaaagccccccagtgctttgcttcttactttaggttacgctgtagatgcttaccgggatcaccctcactgcctgacctccttaacaaatggcacctcgtggtctacgtttgctacaaacttatcacgacaagctttctttgctgaggcttctggacatctgaagttacttcatggtcttgactgcttcgcttctggaagttgtgaactgcgcagctcctcaagaagctataatgcaaactgtggaactcgttattctttctaa

SEQ ID NO: 33 - protein, 928 aa, Chlamydia pneumoniae
MKSSLHWFLISSSLALPLSLNFSAFAAVVEINLGPTNSFSGPGTYTPPAQTTNADGTIYNLTGDVSITNAGSPTALTASCFKETTGNLSFQGHGYQFLLQNIDAGANCTFTNTAANKLLSFSGFSYLSLIQTTNATTGTGAIKSTGACSIQSNYSCYFGQNFSNDNGGALQGSSISLSLNPNLTFAKNKATQKGGALYSTGGITINNTLNSASFSENTAANNGGAIYTEASSFISSNKAISFINNSVTATSATGGAIYCSSTSAPKPVLTLSDNGELNFIGNTAITSGGAIYTDNLVLSSGGPTLFKNNSAIDTAAPLGGAIAIADSGSLSLSALGGDITFEGNTVVKGASSSQTTTRNSINIGNTNAKIVQLRASQGNTIYFYDPITTSITAALSDALNLNGPDLAGNPAYQGTIVFSGEKLSEAEAAEADNLKSTIQQPLTLAGGQLSLKSGVTLVAKSFSQSPGSTLLMDAGTTLETADGITINNLVLNVDSLKETKKATLKATQASQTVTLSGSLSLVDPSGNVYEDVSWNNPQVFSCLTLTADDPANIHITDLAADPLEKNPIHWGYQGNWALSWQEDTATKSKAATLTWTKTGYNPNPERRGTLVANTLWGSFVDVRSIQQLVATKVRQSQETRGIWCEGISNFFHKDSTKINKGFRHISAGYVVGATTTLASDNLITAAFCQLFGKDRDHFINKNRASAYAASLHLQHLATLSSPSLLRYLPGSESEQPVLFDAQISYIYSKNTMKTYYTQAPKGESSWYNDGCALELASSLPHTALSHEGLFHAYFPFIKVEASYIHQDSFKERNTTLVRSFDSGDLINVSVPIGITFERFSRNERASYEATVIYVADVYRKNPDCTTALLINNTSWKTTGTNLSRQAGIGRAGIFYAFSPNLEVTSNLSMEIRGSSRSYNADLGGKFQF

SEQ ID NO: 34 - DNA, 2787 bp, Chlamydia pneumoniae
atgaaatcctctcttcattggtttttaatctcgtcatctttagcacttcccttgtcactaaatttctctgcgtttgctgctgttgttgaaatcaatctaggacctaccaatagcttctctggaccaggaacctacactcctccagcccaaacaacaaatgcagatggaactatctataatctaacaggggatgtctcaatcaccaatgcaggatctccgacagctctaaccgcttcctgctttaaagaaactactgggaatctttctttccaaggccacggctaccaatttctcctacaaaatatcgatgcgggagcgaactgtacctttaccaatacagctgcaaataagcttctctccttttcaggattctcctatttgtcactaatacaaaccacgaatgctaccacaggaacaggagccatcaagtccacaggagcttgttctattcagtcgaactatagttgctactttggccaaaacttttctaatgacaatggaggcgccctccaaggcagctctatcagtctatcgctaaaccccaacctaacgtttgccaaaaacaaagcaacgcaaaaagggggtgccctctattccacgggagggattacaattaacaatacgttaaactcagcatcattttctgaaaataccgcggcgaacaatggcggagccatttacacggaagctagcagttttattagcagcaacaaagcaattagctttataaacaatagtgtgaccgcaacctcagctacagggggagccatttactgtagtagtacatcagcccccaaaccagtcttaactctatcagacaacggggaactgaactttataggaaatacagcaattactagtggtggggcgatttatactgacaatctagttctttcttctggaggacctacgctttttaaaaacaactctgctatagatactgcagctcccttaggaggagcaattgcgattgctgactctggatctttgagtctttcggctcttggtggagacatcacttttgaaggaaacacagtagtcaaaggagcttcttcgagtcagaccactaccagaaattctattaacatcggaaacaccaatgctaagattgtacagctgcgagcctctcaaggcaatactatctacttctatgatcctataacaactagcatcactgcagctctctcagatgctctaaacttaaatggtcctgaccttgcagggaatcctgcatatcaaggaaccatcgtattttctggagagaagctctcggaagcagaagctgcagaagctgataatctcaaatctacaattcagcaacctctaactcttgcgggagggcaactctctcttaaatcaggagtcactctagttgctaagtccttttcgcaatctccgggctctaccctcctcatggatgcagggaccacattagaaaccgctgatgggatcactatcaataatcttgttctcaatgtagattccttaaaagagaccaagaaggctacgctaaaagcaacacaagcaagtcagacagtcactttatctggatcgctctctcttgtagatccttctggaaatgtctacgaagatgtctcttggaataaccctcaagtcttttcttgtctcactcttactgctgacgaccccgcgaatattcacatcacagacttagctgctgatcccctagaaaaaaatcctatccattggggataccaagggaattgggcattatcttggcaagaggatactgcgactaaatccaaagcagcgactcttacctggacaaaaacaggatacaatccgaatcctgagcgtcgtggaaccttagttgctaacacgctatggggatcctttgttgatgtgcgctccatacaacagcttgtagccactaaagtacgccaatctcaagaaactcgcggcatctggtgtgaagggatctcgaacttcttccataaagatagcacgaagataaataaaggttttcgccacataagtgcaggttatgttgtaggagcgactacaacattagcttctgataatcttatcactgcagccttctgccaattattcgggaaagatagagatcactttataaataaaaatagagcttctgcctatgcagcttctctccatctccagcatctagcgaccttgtcttctccaagcttgttacgctaccttcctggatctgaaagtgagcagcctgtcctctttgatgctcagatcagctatatctatagtaaaaatactatgaaaacctattacacccaagcaccaaagggagagagctcgtggtataatgacggttgcgctctggaacttgcgagctccctaccacacactgctttaagccatgagggtctcttccacgcgtattttcctttcatcaaagtagaagcttcgtacatacaccaagatagcttcaaagaacgtaatactaccttggtacgatctttcgatagcggtgatttaattaacgtctctgtgcctattggaattaccttcgagagattctcgagaaacgagcgtgcgtcttacgaagctactgtcatctacgttgccgatgtctatcgtaagaatcctgactgcacgacagctctcctaatcaacaatacctcgtggaaaactacaggaacgaatctctcaagacaagctggtatcggaagagcagggatcttttatgccttctctccaaatcttgaggtcacaagtaacctatctatggaaattcgtggatcttcacgcagctacaatgcagatcttggaggtaagttccagttctaa

SEQ ID NO: 35 - protein, 978 aa, Chlamydia pneumoniae
MPLSFKSSSFCLLACLCSASCAFAETRLGGNFVPPITNQGEEILLTSDFVCSNFLGASFSSSFINSSSNLSLLGKGLSLTFTSCQAPTNSNYALLSAAETLTFKNFSSINFTGNQSTGLGGLIYGKDIVFQSIKDLIFTTNRVAYSPASVTTSATPAITTVTTGASALQPTDSLTVENISQSIKFFGNLANFGSAISSSPTAVVKFINNTATMSFSHNFTSSGGGVIYGGSSLLFENNSGCIIFTANSCVNSLKGVTPSSGTYALGSGGAICIPTGTFELKNNQGKCTFSYNGTPNDAGAIYAETCNIVGNQGALLLDSNTAARNGGAICAKVLNIQGRGPIEFSRNRAEKGGAIFIGPSVGDPAKQTSTLTILASEGDIAFQGNMLNTKPGIRNAITVEAGGEIVSLSAQGGSRLVFYDPITHSLPTTSPSNKDITINANGASGSVVFTSKGLSSTELLLPANTTTILLGTVKIASGELKITDNAVVNVLGFATQGSGQLTLGSGGTLGLATPTGAPAAVDFTIGKLAFDPFSFLKRDFVSASVNAGTKNVTLTGALVLDEHDVTDLYDMVSLQTPVAIPIAVFKGATVTKTGFPDGEIATPSHYGYQGKWSYTWSRPLLIPAPDGGFPGGPSPSANTLYAVWNSDTLVRSTYILDPERYGEIVSNSLWISFLGNQAFSDILQDVLLIDHPGLSITAKALGAYVEHTPRQGHEGFSGRYGGYQAALSMNYTDHTTLGLSFGQLYGKTNANPYDSRCSEQMYLLSFFGQFPIVTQKSEALISWKAAYGYSKNHLNTTYLRPDKAPKSQGQWHNNSYYVLISAEHPFLNWCLLTRPLAQAWDLSGFISAEFLGGWQSKFTETGDLQRSFSRGKGYNVSLPIGCSSQWFTPFKKAPSTLTIKLAYKPDIYRVNPHNIVTVVSNQESTSISGANLRRHGLFVQIHDVVDLTEDTQAFLNYTFDGKNGFTNHRVSTGLKSTF

SEQ ID NO: 36 - DNA, 2937 bp, Chlamydia pneumoniae
atgcctctttctttcaaatcttcatctttttgtctacttgcctgtttatgtagtgcaagttgcgcgtttgctgagactagactcggagggaactttgttcctccaattacgaatcagggtgaagagatcttactcacttcagattttgtttgttcaaacttcttgggggcgagtttttcaagttcctttatcaatagttccagcaatctctccttattagggaagggcctttccttaacgtttacctcttgtcaagctcctacaaatagtaactatgcgctactttctgccgcagagactctgaccttcaagaatttttcttctataaactttacagggaaccaatcgacaggacttggcggcctcatctacggaaaagatattgttttccaatctatcaaagatttgatcttcactacgaaccgtgttgcctattctccagcatctgtaactacgtcggcaactcccgcaatcactacagtaactacaggagcctctgctctccaacctacagactcactcactgtcgaaaacatatcccaatcgatcaagttttttgggaaccttgccaacttcggctctgcaattagcagttctcccacggcagtcgttaaattcatcaataacaccgctaccatgagcttctcccataactttacttcgtcaggaggcggcgtgatttatggaggaagctctctcctttttgaaaacaattctggatgcatcatcttcaccgccaactcctgtgtgaacagcttaaaaggcgtcaccccttcatcaggaacctatgctttaggaagtggcggagccatctgcatccctacgggaactttcgaattaaaaaacaatcaggggaagtgcaccttctcttataatggtacaccaaatgatgcgggtgcgatctacgccgaaacctgcaacatcgtagggaaccagggtgccttgctcctagatagcaacactgcagcgagaaatggcggagccatctgtgctaaagtgctcaatattcaaggacgcggtcctattgaattctctagaaaccgcgcggagaagggtggagctattttcataggcccctctgttggagaccctgcgaagcaaacatcgacacttacgattttggcttccgaaggtgatattgcgttccaaggaaacatgctcaatacaaaacctggaatccgcaatgccatcactgtagaagcagggggagagattgtgtctctatctgcacaaggaggctcacgtcttgtattttatgatcccattacacatagcctcccaaccacaagtccgtctaataaagacattacaatcaacgctaatggcgcttcaggatctgtagtctttacaagtaagggactctcctctacagaactcctgttgcctgccaacacgacaactatacttctaggaacagtcaagatcgctagtggagaactgaagattactgacaatgcggttgtcaatgttcttggcttcgctactcagggctcaggtcagcttaccctgggctctggaggaaccttagggctggcaacacccacgggagcacctgccgctgtagactttacgattggaaagttagcattcgatcctttttccttcctaaaaagagattttgtttcagcatcagtaaatgcaggcacaaaaaacgtcactttaacaggagctctggttcttgatgaacatgacgttacagatctttatgatatggtgtcattacaaactccagtagcaattcctatcgctgttttcaaaggagcaaccgttactaagacaggatttcctgatggggagattgcgactccaagccactacggctaccaaggaaagtggtcctacacatggtcccgtcccctgttaattccagctcctgatggaggatttcctggaggtccctctcctagcgcaaatactctctatgctgtatggaattcagacactctcgtgcgttctacctatatcttagatcccgagcgttacggagaaattgtcagcaacagcttatggatttccttcttaggaaatcaggcattctctgatattctccaagatgttcttttgatagatcatcccgggttgtccataaccgcgaaagctttaggagcctatgtcgaacacacaccaagacaaggacatgagggcttttcaggtcgctatggaggctaccaagctgcgctatctatgaactacacggaccacactacgttaggactttctttcgggcagctttatggaaaaactaacgccaacccctacgattcacgttgctcagaacaaatgtatttactctcgttctttggtcaattccctatcgtgactcaaaagagcgaggccttaatttcctggaaagcagcttatggttattccaaaaatcacctaaataccacctacctcagacctgacaaagctccaaaatctcaagggcaatggcataacaatagttactatgttcttatttctgcagaacatcctttcctaaactggtgtcttcttacaagacctctggctcaagcttgggatctttcaggttttatttccgcagaattcctaggtggttggcaaagtaagttcacagaaactggagatctgcaacgtagctttagtagaggtaaagggtacaatgtttccctaccgataggatgttcttctcaatggttcacaccatttaagaaggctccttctacactgaccatcaaacttgcctacaagcctgatatctatcgtgtcaaccctcacaatattgtgactgtcgtctcaaaccaagagagcacttcgatctcaggagcaaatctacgccgccacggtttgtttgtacaaatccatgatgtagtagatctcaccgaggacactcaggcctttctaaactatacctttgacgggaaaaatggatttacaaaccaccgagtgtctacaggactaaaatccacattttaa

SEQ ID NO: 37 - protein, 192 aa, Chlamydia pneumoniae
MNIHSLWKLCTLLALLALPACSLSPNYGWEDSCNTCHHTRRKKPSSFGFVPLYTEEDFNPNFTFGEYDSKEEKQYKSSQVAAFRNITFATDSYTIKGEENLAILTNLVHYMKKNPKATLYIEGHTDERGAASYNLALGARRANAIKEHLRKQGISADRLSTISYGKEHPLNSGHNELAWQQNRRTEFKIHAR

SEQ ID NO: 38 - DNA, 579 bp, Chlamydia pneumoniae
atgaatatacattccctatggaaactttgtactttattggctttacttgcattgccagcatgtagcctttcccctaattatggctgggaggattcctgtaatacatgccatcatacaagacgaaaaaagccttcttcttttggctttgttcctctctataccgaagaggactttaaccctaattttaccttcggtgagtatgattccaaagaagaaaaacaatacaagtcaagccaagttgcagcatttcgtaatatcacctttgctacagacagctatacaattaaaggtgaagagaaccttgcgattctcacgaacttggttcactacatgaagaaaaacccgaaagctacactgtacattgaagggcatactgacgagcgtggagctgcatcctataaccttgctttaggagcacgacgagccaatgcgattaaagagcatctccgaaagcagggaatctctgcagatcgtctatctactatttcctacggaaaagaacatcctttaaattcgggacacaacgaactagcatggcaacaaaatcgccgtacagagtttaagattcatgcacgctaa

SEQ ID NO: 39 - protein, 431 aa, Chlamydia pneumoniae
MLRQLCFQVFFFCFASLVYAEELEVVVRSEHITLPIEVSCQTDTKDPKIQKYLSSLTEIFCKDIALGDCLQPTAASKESSSPLAISLRLHVPQLSVVLLQSSKTPQTLCSFTISQNLSVDRQKIHHAADTVHYALTGIPGISAGKIVFALSSLGKDQKLKQGELWTTDYDGKNLAPLTTECSLSITPKWVGVGSNFPYLYVSYKYGVPKIFLGSLENTEGKKVLPLKGNQLMPTFSPRKKLLAFVADTYGNPDLFIQPFSLTSGPMGRPRRLLNENFGTQGNPSFNPEGSQLVFISNKDGRPRLYIMSLDPEPQAPRLLTKKYRNSSCPAWSPDGKKIAFCSVIKGVRQICIYDLSSGEDYQLTTSPTNKESPSWAIDSRHLVFSAGNAEESELYLISLVTKKTNKIAIGVGEKRFPSWGAFPQQPIKRTL

SEQ ID NO: 40 - DNA, 1296 bp, Chlamydia pneumoniae
atgttacggcaactatgcttccaagtttttttcttttgcttcgcatcgctagtctatgctgaagaattagaagttgttgtccgttccgaacatatcacgctccctattgaggtctcttgccagaccgatacgaaagatccaaaaatacagaaatacctcagctcgctaacggagatattttgcaaggacattgccctaggagattgtctacaacccacagcggcttctaaagaatcgtcatctcctttagcaatatctttacggttgcatgtacctcagctatctgtagtgcttttacagtcttcaaaaactcctcaaaccttatgttcttttactatttctcaaaatctttctgtagatcgtcaaaaaatccatcacgctgctgatacagttcattacgccctcacagggattcctggaatcagtgctgggaaaattgtttttgctctaagttctttaggaaaagatcaaaagctcaagcaaggagaattatggactacagattacgatgggaaaaacctcgcccctttaaccacagaatgttcgctctctataactccaaaatgggtgggtgtgggatcaaattttccctatctctatgtttcgtataagtatggtgtgcctaaaatttttcttggttccctagagaacactgaaggtaaaaaagtccttccgttaaaaggcaaccaactcatgcctacgttttctccaagaaaaaagcttttagctttcgttgctgatacgtatggaaatcctgatttatttattcaaccgttctcactaacttcaggacctatgggtcgcccacgtcgcctccttaatgagaatttcgggactcaagggaatccctccttcaaccctgaaggatcccagcttgtctttatatcgaacaaagacggccgtccgcgtctttatattatgtccctcgatcctgaaccccaagcacctcgcttgctgacaaaaaaatacagaaatagcagttgccctgcatggtctccagatggtaaaaaaatagccttctgctctgtaattaaaggggtgcgacaaatttgtatttacgatctctcctctggagaggattaccaactcactacgtctcccacaaataaagagagtccttcttgggctatagacagccgtcatcttgtctttagtgcggggaatgctgaagaatcagagttatatttaatcagtctagtcaccaaaaaaactaacaaaattgctataggagtaggagaaaaacggttcccctcctggggtgctttccctcagcaaccgataaagagaacactatga

SEQ ID NO: 41 - protein, 922 aa, Chlamydia pneumoniae
MRFSLCGFPLVFSFTLLSVFDTSLSATTISLTPEDSFHGDSQNAERSYNVQAGDVYSLTGDVSISNVDNSALNKACFNVTSGSVTFAGNHHGLYFNNISSGTTKEGAVLCCQDPQATARFSGFSTLSFIQSPGDIKEQGCLYSKNALMLLNNYVVRFEQNQSKTKGGAISGANVTIVGNYDSVSFYQNAATFGGAIHSSGPLQIAVNQAEIRFAQNTAKNGSGGALYSDGDIDIDQNAYVLFRENEALTTAIGKGGAVCCLPTSGSSTPVPIVTFSDNKQLVFERNHSIMGGGAIYARKLSISSGGPTLFINNISYANSQNLGGAIAIDTGGEISLSAEKGTITFQGNRTSLPFLNGIHLLQNAKFLKLQARNGYSIEFYDPITSEADGSTQLNINGDPKNKEYTGTILFSGEKSLANDPRDFKSTIPQNVNLSAGYLVIKEGAEVTVSKFTQSPGSHLVLDLGTKLIASKEDIAITGLAIDIDSLSSSSTAAVIKANTANKQISVTDSIELISPTGNAYEDLRMRNSQTFPLLSLEPGAGGSVTVTAGDFLPVSPHYGFQGNWKLAWTGTGNKVGEFFWDKINYKPRPEKEGNLVPNILWGNAVDVRSLMQVQETHASSLQTDRGLWIDGIGNFFHVSASEDNIRYRHNSGGYVLSVNNEITPKHYTSMAFSQLFSRDKDYAVSNNEYRMYLGSYLYQYTTSLGNIFRYASRNPNVNVGILSRRFLQNPLMIFHFLCAYGHATNDMKTDYANFPMVKNSWRNNCWAIECGGSMPLLVFENGRLFQGAIPFMKLQLVYAYQGDFKETTADGRRFSNGSLTSISVPLGIRFEKLALSQDVLYDFSFSYIPDIFRKDPSCEAALVISGDSWLVPAAHVSRHAFVGSGTGRYHFNDYTELLCRGSIECRPHARNYNINCGSKFRF

SEQ ID NO: 42 - DNA, 2769 bp, Chlamydia pneumoniae
atgcgattttcgctctgcggatttcctctagttttttcttttacattgctctcagtcttcgacacttctttgagtgctactacgatttctttaaccccagaagatagttttcatggagatagtcagaatgcagaacgttcttataatgttcaagctggggatgtctatagccttactggtgatgtctcaatatctaacgtcgataactctgcattaaataaagcctgcttcaatgtgacctcaggaagtgtgacgttcgcaggaaatcatcatgggttatattttaataatatttcctcaggaactacaaaggaaggggctgtactttgttgccaagatcctcaagcaacggcacgtttttctgggttctccacgctctcttttattcagagccccggagatattaaagaacagggatgtctctattcaaaaaatgcacttatgctcttaaacaattatgtagtgcgttttgaacaaaaccaaagtaagactaaaggcggagctattagtggggcgaatgttactatagtaggcaactacgattccgtctctttctatcagaatgcagccacttttggaggtgctatccattcttcaggtcccctacagattgcagtaaatcaggcagagataagatttgcacaaaatactgccaagaatggttctggaggggctttgtactccgatggtgatattgatattgatcagaatgcttatgttctatttcgagaaaatgaggcattgactactgctataggtaagggaggggctgtctgttgtcttcccacttcaggaagtagtactccagttcctattgtgactttctctgacaataaacagttagtctttgaaagaaaccattccataatgggtggcggagccatttatgctaggaaacttagcatctcttcaggaggtcctactctatttatcaataatatatcatatgcaaattcgcaaaatttaggtggagctattgccattgatactggaggggagatcagtttatcagcagagaaaggaacaattacattccaaggaaaccggacgagcttaccgtttttgaatggcatccatcttttacaaaatgctaaattcctgaaattacaggcgagaaatggatactctatagaattttatgatcctattacttctgaagcagatgggtctacccaattgaatatcaacggagatcctaaaaataaagagtacacagggaccatactcttttctggagaaaagagtctagcaaacgatcctagggattttaaatctacaatccctcagaacgtcaacctgtctgcaggatacttagttattaaagagggggccgaagtcacagtttcaaaattcacgcagtctccaggatcgcatttagttttagatttaggaaccaaactgatagcctctaaggaagacattgccatcacaggcctcgcgatagatatagatagcttaagctcatcctcaacagcagctgttattaaagcaaacaccgcaaataaacagatatccgtgacggactctatagaacttatctcgcctactggcaatgcctatgaagatctcagaatgagaaattcacagacgttccctctgctctctttagagcctggagccgggggtagtgtgactgtaactgctggagatttcctaccggtaagtccccattatggttttcaaggcaattggaaattagcttggacaggaactggaaacaaagttggagaattcttctgggataaaataaattataagcctagacctgaaaaagaaggaaatttagttcctaatatcttgtgggggaatgctgtagatgtcagatccttaatgcaggttcaagagacccatgcatcgagcttacagacagatcgagggctgtggatcgatggaattgggaatttcttccatgtatctgcctccgaagacaatataaggtaccgtcataacagcggtggatatgttctatctgtaaataatgagatcacacctaagcactatacttcgatggcattttcccaactctttagtagagacaaggactatgcggtttccaacaacgaatacagaatgtatttaggatcgtatctctatcaatatacaacctccctagggaatattttccgttatgcttcgcgtaaccctaatgtaaacgtcgggattctctcaagaaggtttcttcaaaatcctcttatgatttttcattttttgtgtgcttatggtcatgccaccaatgatatgaaaacagactacgcaaatttccctatggtgaaaaacagctggagaaacaattgttgggctatagagtgcggagggagcatgcctctattggtatttgagaacggaagacttttccaaggtgccatcccatttatgaaactacaattagtttatgcttatcagggagatttcaaagagacgactgcagatggccgtagatttagtaatgggagtttaacatcgatttctgtacctctaggcatacgctttgagaagctggcactttctcaggatgtactctatgactttagtttctcctatattcctgatattttccgtaaggatccctcatgtgaagctgctctggtgattagcggagactcctggcttgttccggcagcacacgtatcaagacatgcttttgtagggagtggaacgggtcggtatcactttaacgactatactgagctcttatgtcgaggaagtatagaatgccgcccccatgctaggaattataatataaactgtggaagcaaatttcgtttttag

SEQ ID NO: 43 - protein, 390 aa, Chlamydia pneumoniae
MSSPVNNTPSAPNIPIPAPTTPGIPTTKPRSSFIEKVIIVAKYILFAIAATSGALGTILGLSGALTPGIGIALLVIFFVSMVLLGLILKDSISGGEERRLREEVSRFTSENQRLTVITTTLETEVKDLKAAKDQLTLEIEAFRNENGNLKTTAEDLEEQVSKLSEQLEALERINQLIQANAGDAQEISSELKKLISGWDSKVVEQINTSIQALKVLLGQEWVQEAQTHVKAMQEQIQALQAEILGMHNQSTALQKSVENLLVQDQALTRVVGELLESENKLSQACSALRQEIEKLAQHETSLQQRIDAMLAQEQNLAEQVTALEKMKQEAQKAESEFIACVRDRTFGRRETPPPTTPVVEGDESQEEDEGGTPPVSQPSSPVDRATGDGQ

SEQ ID NO: 44 - DNA, 1173 bp, Chlamydia pneumoniae
atgtcatctcctgtaaataacacaccctcagcaccaaacattccaataccagcgcccacgactccaggtattcctacaacaaaacctcgttctagtttcattgaaaaggttatcattgtagctaagtacatactatttgcaattgcagccacatcaggagcactcggaacaattctaggtctatctggagcgctaaccccaggaataggtattgcccttcttgttatcttctttgtttctatggtgcttttaggtttaatccttaaagattctataagtggaggagaagaacgcaggctcagagaagaggtctctcgatttacaagtgagaatcaacggttgacagtcataaccacaacacttgagactgaagtaaaggatttaaaagcagctaaagatcaacttacacttgaaatcgaagcatttagaaatgaaaacggtaatttaaaaacaactgctgaggacttagaagagcaggtttctaaacttagcgaacaattagaagcactagagcgaattaatcaacttatccaagcaaacgctggagatgctcaagaaatttcgtctgaactaaagaaattaataagcggttgggattccaaagttgttgaacagataaatacttctattcaagcattgaaagtgttattgggtcaagagtgggtgcaagaggctcaaacacacgttaaagcaatgcaagagcaaattcaagcattgcaagctgaaattctaggaatgcacaatcaatctacagcattgcaaaagtcagttgagaatctattagtacaagatcaagctctaacaagagtagtaggtgagttgttagagtctgagaacaagctaagccaagcttgttctgcgctacgtcaagaaatagaaaagttggcccaacatgaaacatctttgcaacaacgtattgatgcgatgctagcccaagagcaaaatttggcagagcaggtcacagcccttgaaaaaatgaaacaagaagctcagaaggctgagtccgagttcattgcttgtgtacgtgatcgaactttcggacgtcgtgaaacacctccaccaacaacacctgtagttgaaggtgatgaaagtcaagaagaagacgaaggaggtactcccccagtatcacaaccatcttcacccgtagatagagcaacaggagatggtcagtaa

SEQ ID NO: 45 - protein, 930 aa, Chlamydia pneumoniae
MKIPLHKLLISSTLVTPILLSIATYGADASLSPTDSFDGAGGSTFTPKSTADANGTNYVLSGNVYINDAGKGTALTGCCFTETTGDLTFTGKGYSFSFNTVDAGSNAGAAASTTADKALTFTGFSNLSFIAAPGTTVASGKSTLSSAGALNLTDNGTILFSQNVSNEANNNGGAITTKTLSISGNTSSITFTSNSAKKLGGAIYSSAAASISGNTGQLVFMNNKGETGGGALGFEASSSITQNSSLFFSGNTATDAAGKGGAIYCEKTGETPTLTISGNKSLTFAENSSVTQGGAICAHGLDLSAAGPTLFSNNRCGNTAAGKGGAIAIADSGSLSLSANQGDITFLGNTLTSTSAPTSTRNAIYLGSSAKITNLRAAQGQSIYFYDPIASNTTGASDVLTINQPDSNSPLDYSGTIVFSGEKLSADEAKAADNFTSILKQPLALASGTLALKGNVELDVNGFTQTEGSTLLMQPGTKLKADTEAISLTKLVVDLSALEGNKSVSIETAGANKTITLTSPLVFQDSSGNFYESHTINQAFTQPLVVFTAATAASDIYIDALLTSPVQTPEPHYGYQGHWEATWADTSTAKSGTMTWVTTGYNPNPERRASVVPDSLWASFTDIRTLQQIMTSQANSIYQQRGLWASGTANFFHKDKSGTNQAFRHKSYGYIVGGSAEDFSENIFSVAFCQLFGKDKDLFIVENTSHNYLASLYLQHRAFLGGLPMPSFGSITDMLKDIPLILNAQLSYSYTKNDMDTRYTSYPEAQGSWTNNSGALELGGSLALYLPKEAPFFQGYFPFLKFQAVYSRQQNFKESGAEARAFDDGDLVNCSIPVGIRLEKISEDEKNNFEISLAYIGDVYRKNPRSRTSLMVSGASWTSLCKNLARQAFLASAGSHLTLSPHVELSGEAAYELRGSAHIYNVDCGLRYSF

SEQ ID NO: 46 - DNA, 2793 bp, Chlamydia pneumoniae
atgaaaatacccttgcacaaactcctgatctcttcgactcttgtcactcccattctattgagcattgcaacttacggagcagatgcttctttatcccctacagatagctttgatggagcgggcggctctacatttactccaaaatctacagcagatgccaatggaacgaactatgtcttatcaggaaatgtctatataaacgatgctgggaaaggcacagcattaacaggctgctgctttacagaaactacgggtgatctgacatttactggaaagggatactcattttcattcaacacggtagatgcgggttcgaatgcaggagctgcggcaagcacaactgctgataaagccctaacattcacaggattttctaacctttccttcattgcagctcctggaactacagttgcttcaggaaaaagtactttaagttctgcaggagccttaaatcttaccgataatggaacgattctctttagccaaaacgtctccaatgaagctaataacaatggcggagcgatcaccacaaaaactctttctatttctgggaatacctcttctataaccttcactagtaatagcgcaaaaaaattaggtggagcgatctatagctctgcggctgcaagtatttcaggaaacaccggccagttagtctttatgaataataaaggagaaactgggggtggggctctgggctttgaagccagctcctcgattactcaaaatagctcccttttcttctctggaaacactgcaacagatgctgcaggcaagggcggggccatttattgtgaaaaaacaggagagactcctactcttactatctctggaaataaaagtctgaccttcgccgagaactcttcagtaactcaaggcggagcaatctgtgcccatggtctagatctttccgctgctggccctaccctattttcaaataatagatgcgggaacacagctgcaggcaagggcggcgctattgcaattgccgactctggatctttaagtctctctgcaaatcaaggagacatcacgttccttggcaacactctaacctcaacctccgcgccaacatcgacacggaatgctatctacctgggatcgtcagcaaaaattacgaacttaagggcagcccaaggccaatctatctatttctatgatccgattgcatctaacaccacaggagcttcagacgttctgaccatcaaccaaccggatagcaactcgcctttagattattcaggaacgattgtattttctggggaaaagctctctgcagatgaagcgaaagctgctgataacttcacatctatattaaagcaaccattggctctagcctctggaaccttagcactcaaaggaaatgtcgagttagatgtcaatggtttcacacagactgaaggctctacactcctcatgcaaccaggaacaaagctcaaagcagatactgaagctatcagtcttaccaaacttgtcgttgatctttctgccttagagggaaataagagtgtgtccattgaaacagcaggagccaacaaaactataactctaacctctcctcttgttttccaagatagtagcggcaatttttatgaaagccatacgataaaccaagccttcacgcagcctttggtggtattcactgctgctactgctgctagcgatatttatatcgatgcgcttctcacttctccagtacaaactccagaacctcattacgggtatcagggacattgggaagccacttgggcagacacatcaactgcaaaatcaggaactatgacttgggtaactacgggctacaaccctaatcctgagcgtagagcttccgtagttcccgattcattatgggcatcctttactgacattcgcactctacagcagatcatgacatctcaagcgaatagtatctatcagcaacgaggactctgggcatcaggaactgcgaatttcttccataaggataaatcaggaactaaccaagcattccgacataaaagctacggctatattgttggaggaagtgctgaagatttttctgaaaatatcttcagtgtagctttctgccagctcttcggtaaagataaagacctgtttatagttgaaaatacctctcataactatttagcgtcgctatacctgcaacatcgagcattcctaggaggacttcccatgccctcatttggaagtatcaccgacatgctgaaagatattcctctcattttgaatgcccagctaagctacagctacactaaaaatgatatggatactcgctatacttcctatcctgaagctcaaggctcttggaccaataactctggggctctagagctcggaggatctctggctctatatctccctaaagaagcaccgttcttccagggatatttccccttcttaaagttccaggcagtctacagccgccaacaaaactttaaagagagtggcgctgaagcccgtgcttttgatgatggagacctagtgaactgctctatccctgtcggcattcggttagaaaaaatctccgaagatgaaaaaaataatttcgagatttctctagcctacattggtgatgtgtatcgtaaaaatccccgttcgcgtacttctctaatggtcagtggagcctcttggacttcgctatgtaaaaacctcgcacgacaagccttcttagcaagtgctggaagccatctgactctctcccctcatgtagaactctctggggaagctgcttatgagcttcgtggctcagcacacatctacaatgtagattgtgggctaagatactcattctag

SEQ ID NO: 47 - protein, 556 aa, Chlamydia pneumoniae [sequence omitted]

SEQ ID NO: 48 - DNA, 1671 bp, Chlamydia pneumoniae
atgtccaaactcatcagacgagtagttacggtccttgcgctaacgagtatggcgagttgctttgccagcgggggtatagaggccgctgtagcagagtctctgattactaagatcgtcgctagtgcggaaacaaagccagcacctgttcctatgacagcgaagaaggttagacttgtccgtagaaataaacaaccagttgaacaaaaaagccgtggtgctttttgtgataaagaattttatccctgtgaagagggacgatgtcaacctgtagaggctcagcaagagtcttgctacggaagattgtattctgtaaaagtaaacgatgattgcaacgtagaaatttgccagtccgttccagaatacgctactgtaggatctccttaccctattgaaatccttgctataggcaaaaaagattgtgttgatgttgtgattacacaacagctaccttgcgaagctgaattcgtaagcagtgatccagaaacaactcctacaagtgatgggaaattagtctggaaaatcgatcgcctgggtgcaggagataaatgcaaaattactgtatgggtaaaacctcttaaagaaggttgctgcttcacagctgctactgtatgtgcttgcccagagctccgttcttatactaaatgcggtcaaccagccatttgtattaagcaagaaggacctgactgtgcttgcctaagatgccctgtatgctacaaaatcgaagtagtgaacacaggatctgctattgcccgtaacgtaactgtagataatcctgttcccgatggctattctcatgcatctggtcaaagagttctctcttttaacttaggagacatgagacctggcgataaaaaggtatttacagttgagttctgccctcaaagaagaggtcaaatcactaacgttgctactgtaacttactgcggtggacacaaatgttctgcaaatgtaactacagttgttaatgagccttgtgtacaagtaaatatctctggtgctgattggtcttacgtatgtaaacctgtggagtactctatctcagtatcgaatcctggagacttggttcttcatgatgtcgtgatccaagatacactcccttctggtgttacagtactcgaagctcctggtggagagatctgctgtaataaagttgtttggcgtattaaagaaatgtgcccaggagaaaccctccagtttaaacttgtagtgaaagctcaagttcctggaagattcacaaatcaagttgcagtaactagtgagtctaactgcggaacatgtacatcttgcgcagaaacaacaacacattggaaaggtcttgcagctacccatatgtgcgtattagacacaaatgatcctatctgtgtaggagaaaatactgtctatcgtatctgtgtaactaaccgtggttctgctgaagatactaacgtatctttaatcttgaagttctcaaaagaacttcagccaatagcttcttcaggtccaactaaaggaacgatttcaggtaataccgttgttttcgacgctttacctaaactcggttctaaggaatctgtagagttttctgttaccttgaaaggtattgctcccggagatgctcgcggcgaagctattctttcttctgatacactgacttcaccagtatcagacacagaaaatacccacgtgtattaa

SEQ ID NO: 49 - protein, 568 aa, Chlamydia pneumoniae
MGLFHLTLFGLLLCSLPISLVAKFPESVGHKILYISTQSTQQALATYLEALDAYGDHDFFVLRKIGEDYLKQSIHSSDPQTRKSTIIGAGLAGSSEALDVLSQAMETADPLQQLLVLSAVSGHLGKTSDDLLFKALASPYPVIRLEAAYRLANLKNTKVIDHLHSFIHKLPEEIQCLSAAIFLRLETEESDAYIRDLLAAKKSAIRSATALQIGEYQQKRFLPTLRNLLTSASPQDQEAILYALGKLKDGQSYYNIKKQLQKPDVDVTLAAAQALIALGKEEDALPVIKKQALEERPRALYALRHLPSEIGIPIALPIFLKTKNSEAKLNVALALLELGCDTPKLLEYITERLVQPHYNETLALSFSKGRTLQNWKRVNIIVPQDPQERERLLSTTRGLEEQILTFLFRLPKEAYLPCIYKLLASQKTQLATTAISFLSHTSHQEALDLLFQAAKLPGEPIIRAYADLAIYNLTKDPEKKRSLHDYAKKLIQETLLFVDTENQRPHPSMPYLRYQVTPESRTKLMLDILETLATSKSSEDIRLLIQLMTEGDAKNFPVLAGLLIKIVE

SEQ ID NO: 50 - DNA, 1707 bp, Chlamydia pneumoniae
atgggactattccatctaactctctttggacttttattgtgtagtcttcccatttctcttgttgctaaattccctgagtctgtaggtcataagatcctttatataagtacgcaatctacacagcaggccttagcaacatatctggaagctctagatgcctacggtgatcatgacttcttcgttttaagaaaaatcggagaagactatctcaagcaaagcatccactcctcagatccgcaaactagaaaaagcaccatcattggagcaggcctggcgggatcttcagaagccttggacgtgctctcccaagctatggaaactgcagaccccctgcagcagctactggttttatcggcagtctcaggacatcttgggaaaacttctgacgacttactgtttaaagctttagcatctccctatcctgtcatccgcttagaagccgcctatagacttgctaatttgaagaacactaaagtcattgatcatctacattctttcattcataagcttcccgaagaaatccaatgcctatctgcggcaatattcctacgcttggagactgaagaatctgatgcttatattcgggatctcttagctgccaagaaaagcgcgattcggagtgccacagctttgcagatcggagaataccaacaaaaacgctttcttccgacacttaggaatttgctaacgagtgcgtctcctcaagatcaagaagctattctttatgctttagggaagcttaaggatggtcagagctactacaatataaaaaagcaattgcagaagcctgatgtggatgtcactttagcagcagctcaagctttaattgctttggggaaagaagaggacgctcttcccgtgataaaaaagcaagcacttgaggagcggcctcgagccctgtatgccttacggcatctaccctctgagatagggattccgattgccctgccgatattcctaaaaactaagaacagcgaagccaagttgaatgtagctttagctctcttagagttagggtgtgacacccctaaactactggaatacattaccgaaaggcttgtccaaccacattataatgagactctagccttgagtttctctaaggggcgtactttacaaaattggaagcgggtgaacatcatagtccctcaagatccccaggagagggaaaggttgctctccacaacccgaggtcttgaagagcagatccttacgtttctcttccgcctacctaaagaagcttacctcccctgtatttataagcttttggcgagtcagaaaactcagcttgccactactgcgatttcttttttaagtcacacctcacatcaggaagccttagatctacttttccaagctgcgaagcttcctggagaacctatcatccgcgcctatgcagatcttgctatttataatctcaccaaagatcctgaaaaaaaacgttctctccatgattatgcaaaaaagctaattcaggaaaccttgttatttgtggacacggaaaaccaaagaccccatcccagcatgccctatctacgttatcaggtcaccccagaaagccgtacgaagctcatgttggatattctagagacactagccacctcgaagtcttccgaagatatccgtttattgatacaactgatgacggaaggagatgcaaaaaatttcccagtccttgcaggcttactcataaaaattgtggagtaa

SEQ ID NO: 51 - protein, 514 aa, Chlamydia pneumoniae
MTILRNFLTCSALFLALPAAAQVVYLHESDGYNGAINNKSLEPKITCYPEGTSYIFLDDVRISNVKHDQEDAGVFINRSGNLFFMGNRCNFTFHNLMTEGFGAAISNRVGDTTLTLSNFSYLAFTSAPLLPQGQGAIYSLGSVMIENSEEVTFCGNYSSWSGAAIYTPYLLGSKASRPSVNLSGNRYLVFRDNVSQGYGGAISTHNLTLTTRGPSCFENNHAYHDVNSNGGAIAIAPGGSISISVKSGDLIFKGNTASQDGNTIHNSIHLQSGAQFKNLRAVSESGVYFYDPISHSESHKITDLVINAPEGKETYEGTISFSGLCLDDHEVCAENLTSTILQDVTLAGGTLSLSDGVTLQLHSFKQEASSTLTMSPGTTLLCSGDARVQNLHILIEDTDNFVPVRIRAEDKDALVSLEKLKVAFEAYWSVYDFPQFKEAFTIPLLELLGPSFDSLLLGETTLERTQVTTENDAVRGFWSLSWEEYPPSLDKDRRITPTKKTVFLTWNPEITSTP

SEQ ID NO: 52 - DNA, 1545 bp, Chlamydia pneumoniae
atgaccatacttcgaaattttcttacctgctcggctttattcctcgctctccctgcagcagcacaagttgtatatcttcatgaaagtgatggttataacggtgctatcaataataaaagcttagaacctaaaattacctgttatccagaaggaacttcttacatctttctagatgacgtgaggatttccaacgttaagcatgatcaagaagatgctggggtttttataaatcgatctgggaatctttttttcatgggcaaccgttgcaacttcacttttcacaaccttatgaccgagggttttggcgctgccatttcgaaccgcgttggagacaccactctcactctctctaatttttcttacttagcgttcacctcagcacctctactacctcaaggacaaggagcgatttatagtcttggttccgtgatgatcgaaaatagtgaggaagtgactttctgtgggaactactcttcgtggagtggagctgcgatttatactccctaccttttaggttctaaggcgagtcgtccttcagtaaatctcagcgggaaccgctacctggtgtttagagacaatgtgagccaaggttatggcggcgccatatctacccacaatctcacactcacgactcgaggaccttcgtgttttgaaaataatcatgcttatcatgacgtgaatagtaatggaggagccattgccattgctcctggaggatcgatctctatatccgtgaaaagcggagatctcatcttcaaaggaaatacagcatcacaagacggaaatacaatacacaactccatccatctgcaatctggagcacagtttaagaacctacgtgctgtttcagaatccggagtttatttctatgatcctataagccatagcgagtcgcataaaattacagatcttgtaatcaatgctcctgaaggaaaggaaacttatgaaggaacaattagcttctcaggactatgcctggatgatcatgaagtttgtgcggaaaatcttacttccacaatcctacaagatgtcacattagcaggaggaactctctctctatcggatggggttaccttgcaactgcattcttttaagcaggaagcaagctctacgcttactatgtctccaggaaccactctgctctgctcaggagatgctcgggttcagaatctgcacatcctgattgaagataccgacaactttgttcctgtaaggattcgcgccgaggacaaggatgctcttgtctcattagaaaaacttaaagttgcctttgaggcttattggtccgtctatgactttcctcaatttaaggaagcctttacgattcctcttcttgaacttctagggccttcttttgacagtcttctcctaggggagaccactttggagagaacccaagtcacaacagagaatgacgccgttcgaggtttctggtccctaagctgggaagagtaccccccttctctggataaagacagaaggatcacaccaactaagaaaactgttttcctcacttggaatcctgagatcacttctacgccataa

SEQ ID NO: 53 - protein, 317 aa, Chlamydia pneumoniae
MNRRKARWVVALFAMTALISVGCCPWSQAKSRCSIDKYIPVVNRLLEVCGLPEAENVEDLIESSSAWVLTPEERFSGELVSICQVKDEHAFYNDLSLLHMTQAVPSYSATYDCAVVFGGPLPALRQRLDFLVREWQRGVRFKKIVFLCGERGRYQSIEEQEHFFDSRYNPFPTEENWESGNRVTPSSEEEIAKFVWMQMLLPRAWRDSTSGVRVTFLLAKPEENRVVANRKDTLLLFRSYQEAFPGRVLFVSSQPFIGLDACRVGQFFKGESYDLAGPGFAQGVLKYHWAPRICLHTLAEWLKETNGCLNISEGCFG

SEQ ID NO: 54 - DNA, 954 bp, Chlamydia pneumoniae
atgaatagaagaaaagcaagatgggtagtggcattgttcgcaatgacggcgctcatttctgttgggtgttgtccttggtcacaagcgaaatcaagatgttctattgataagtatattcctgtagtcaatcgtttactagaagtttgtggacttcctgaagctgagaatgttgaggatttaatcgagtcctcgtctgcttgggtactgactcctgaagaacgtttttctggagagttagtctctatctgtcaggttaaagatgagcatgctttctataacgatttgtctttattacatatgactcaggctgtgccttcgtattctgcaacgtatgattgtgctgtagtttttggcgggcctttgccagcgctacgtcagcgcttagattttttggtgcgagagtggcagcgtggcgtgcgctttaagaaaatcgtttttctatgtggagagcgagggcgctatcagtctattgaagaacaagagcatttctttgattctcggtacaatcctttccctactgaagagaactgggaatctggtaaccgagttactccctcttctgaagaagagattgccaaatttgtttggatgcaaatgcttttacctagagcatggcgagatagtacttcaggagtcagagtgacatttcttctagcaaagccagaggaaaatcgtgtggttgcgaatcgtaaggacaccttacttttattccgttcttatcaagaagcgtttccgggacgcgtgttatttgtaagtagtcaaccctttatcggtttagatgcttgcagggtcgggcagtttttcaaaggggaaagctatgatcttgctggacctggatttgctcaaggagtcttgaagtatcattgggctccaaggatttgtctacatactttagcggaatggttaaaggaaacgaacggctgcttaaatatttcagagggttgttttggatga

SEQ ID NO: 55 - protein, 258 aa, Chlamydia pneumoniae
MNRRWNLVLATVALALSVASCDVRSKDKDKDQGSLVEYKDNKDTNDIELSDNQKLSRTFGHLLARQLRKSEDMFFDIAEVAKGLQAELVCKSAPLTETEYEEKMAEVQKLVFEKKSKENLSLAEKFLKENSKNAGVVEVQPSKLQYKIIKEGAGKAISGKPSALLHYKGSFINGQVFSSSEGNNEPILLPLGQTIPGFALGMQGMKEGETRVLYIHPDLAYGTAGQLPPNSLLIFEINLIQASADEVAAVPQEGNQGE

SEQ ID NO: 56 - DNA, 777 bp, Chlamydia pneumoniae
atgaacagacggtggaatttagttttagcaacagtagctctggcactctccgtcgcttcttgtgacgtacggtctaaggataaagacaaggatcaggggtcgttagtggaatataaagataacaaagataccaatgacatagaattatccgataatcaaaagttatccagaacatttggtcatttattagcacgccaattacgcaagtcagaagatatgttttttgatattgcagaagtggctaaggggttgcaggcggaattggtttgtaaaagtgctcctttaacagaaacagagtatgaagaaaaaatggctgaagtacagaagttggtttttgaaaaaaaatcaaaagaaaatctttcattggcagaaaaattcttaaaagaaaatagcaagaacgctggtgttgttgaagtgcaaccaagtaaattgcaatacaaaattattaaagaaggtgcagggaaagcaatttcaggtaaaccttcagctctattgcactacaagggttccttcatcaatggccaagtatttagcagttcagaaggcaacaatgagcctatcttgcttcctctaggccaaacaattcctggttttgctttaggtatgcagggcatgaaagaaggagaaactcgagttctctacatccatcctgatcttgcttacggaaccgcaggacaacttcctccaaactctttattaatttttgaaattaacttgattcaggcttcagcagatgaagttgctgctgtaccccaagaaggaaatcaaggtgaatga

SEQ ID NO: 57 - protein, 318 aa, Chlamydia pneumoniae
MKFLLYVPLLLVLVSTGCDAKPVSFEPFSGKLSTQRFEPQHSAEEYFSQGQEFLKKGNFRKALLCFGIITHHFPRDILRNQAQYLIGVCYFTQDHPDLADKAFASYLQLPDAEYSEELFQMKYAIAQRFAQGKRKRICRLEGFPKLMNADEDALRIYDEILTAFPSKDLGAQALYSKAALLIVKNDLTEATKTLKKLTLQFPLHILSSEAFVRLSEIYLQQAKKEPHNLQYLHFAKLNEEAMKKQHPNHPLNEVVSANVGAMREHYARGLYATGRFYEKKKKAEAANIYYRTAITNYPDTLLVAKCQKRLDRISKHTS

SEQ ID NO: 58 - DNA, 957 bp, Chlamydia pneumoniae
atgaaatttctattatacgttccacttcttcttgttctcgtatctacggggtgcgatgcaaaacctgtttcttttgagcccttttcaggaaagctttccacccagcgttttgagcctcagcactctgctgaagaatatttttctcagggacaggaattcttaaaaaaaggaaatttcagaaaagctttactatgctttggaatcattacgcatcacttccctagggacatcttgcgtaatcaagcacagtatcttataggagtctgttacttcacgcaggatcacccagatttagcagacaaggcatttgcatcttacttacaacttcctgatgcggagtactctgaagagttgttccagatgaaatatgcgattgctcaaagatttgctcaagggaagcgtaaacggatttgtcgattagagggcttcccaaaactaatgaatgctgatgaagatgcgctacgcatttatgacgagattctaacagcgtttcctagtaaagacttaggagctcaggccctctatagtaaagctgcgttacttattgtaaaaaacgatcttacagaagccaccaaaaccttaaaaaaactcacgttacaatttcctctacatattttatcttcagaggcctttgtacgtttatcggaaatctatttacagcaagctaagaaagagcctcacaatcttcaatatcttcattttgcaaagcttaatgaagaggcaatgaaaaagcagcatcctaaccatcctctgaatgaggttgtttctgctaatgttggagctatgcgggaacattatgctcgaggtttgtatgccacaggtcgtttctatgagaagaagaaaaaagccgaggctgcgaatatctattaccgcactgcgattacaaactacccagacactttattagtggctaaatgtcaaaagcgtctagatagaatatctaagcatacttcctaa

SEQ ID NO: 59 - protein, 389 aa, Chlamydia pneumoniae
MKKLLKSALLSAAFAGSVGSLQALPVGNPSDPSLLIDGTIWEGAAGDPCDPCATWCDAISLRAGFYGDYVFDRILKVDAPKTFSMGAKPTGSAAANYTTAVDRPNPAYNKHLHDAEWFTNAGFIALNIWDRFDVFCTLGASNGYIRGNSTAFNLVGLFGVKGTTVNANELPNVSLSNGVVELYTDTSFSWSVGARGALWECGCATLGAEFQYAQSKPKVEELNVICNVSQFSVNKPKGYKGVAFPLPTDAGVATATGTKSATINYHEWQVGASLSYRLNSLVPYIGVQWSRATFDADNIRIAQPKLPTAVLNLTAWNPSLLGNATALSTTDSFSDFMQIVSCQINKFKSRKACGVTVGATLVDADKWSLTAEARLINERAAHVSGQFRF

SEQ ID NO: 60 - DNA, 1170 bp, Chlamydia pneumoniae
atgaaaaaactcttaaagtcggcgttattatccgccgcatttgctggttctgttggctccttacaagccttgcctgtagggaacccttctgatccaagcttattaattgatggtacaatatgggaaggtgctgcaggagatccttgcgatccttgcgctacttggtgcgacgctattagcttacgtgctggattttacggagactatgttttcgaccgtatcttaaaagtagatgcacctaaaacattttctatgggagccaagcctactggatccgctgctgcaaactatactactgccgtagatagacctaacccggcctacaataagcatttacacgatgcagagtggttcactaatgcaggcttcattgccttaaacatttgggatcgctttgatgttttctgtactttaggagcttctaatggttacattagaggaaactctacagcgttcaatctcgttggtttattcggagttaaaggtactactgtaaatgcaaatgaactaccaaacgtttctttaagtaacggagttgttgaactttacacagacacctctttctcttggagcgtaggcgctcgtggagccttatgggaatgcggttgtgcaactttgggagctgaattccaatatgcacagtccaaacctaaagttgaagaacttaatgtgatctgtaacgtatcgcaattctctgtaaacaaacccaagggctataaaggcgttgctttccccttgccaacagacgctggcgtagcaacagctactggaacaaagtctgcgaccatcaattatcatgaatggcaagtaggagcctctctatcttacagactaaactctttagtgccatacattggagtacaatggtctcgagcaacttttgatgctgataacatccgcattgctcagccaaaactacctacagctgttttaaacttaactgcatggaacccttctttactaggaaatgccacagcattgtctactactgattcgttctcagacttcatgcaaattgtttcctgtcagatcaacaagtttaaatctagaaaagcttgtggagttactgtaggagctactttagttgatgctgataaatggtcacttactgcagaagctcgtttaattaacgagagagctgctcacgtatctggtcagttcagattctaa

SEQ ID NO: 61 - protein, 604 aa, Chlamydia pneumoniae
MKHTFTKRVLFFFFLVIPIPLLLNLMVVGFFSFSAAKANLVQVLHTRATNLSIEFEKKLTIHKLFLDRLANTLALKSYASPSAEPYAQAYNEMMALSNTDFSLCLIDPFDGSVRTKNPGDPFIRYLKQHPEMKKKLSAAVGKAFLLTIPGKPLLHYLILVEDVASWDSTTTSGLLVSFYPMSFLQKDLFQSLHITKGNICLVNKYGEVLFCAQDSESSFVFSLDLPNLPQFQARSPSAIEIEKASGILGGENLITVSINKKRYLGLVLNKIPIQGTYTLSLVPVSDLIQSALKVPLNICFFYVLAFLLMWWIFSKINTKLNKPLQELTFCMEAAWRGNHNVRFEPQPYGYEFNELGNIFNCTLLLLLNSIEKADIDYHSGEKLQKELGILSSLQSALLSPDFPTFPKVTFSSQHLRRRQLSGHFNGWTVQDGGDTLLGIIGLAGDIGLPSYLYALSARSLFLAYASSDVSLQKISKDTADSFSKTTEGNEAVVAMTFIKYVEKDRSLELLSLSEGAPTMFLQRGESFVRLPLETHQALQPGDRLICLTGGEDILKYFSQLPIEELLKDPLNPLNTENLIDSLTMMLNNETEHSADGTLTILSFS

SEQ ID NO: 62 - DNA, 1815 bp, Chlamydia pneumoniae
atgaaacatacctttaccaagcgtgttctattttttttctttttagtgattcccattcccctactcctcaatcttatggtcgtaggttttttctcattttctgccgctaaagcaaatttagtacaggtcctccatacccgtgctacgaacttaagtatagaattcgaaaaaaaactgacgatacacaagcttttcctcgatagacttgccaacacattagccttaaaatcctatgcatctccttctgcagagccctatgcacaggcatacaatgagatgatggcactctccaatacagacttttccttatgccttatagatccctttgatggatctgtaaggacgaaaaatcctggagaccctttcattcgctatctaaaacagcatcctgaaatgaagaaaaagctatccgcagctgtagggaaagcctttttattgaccattccaggtaaaccacttttacattatcttattctagttgaagatgtcgcatcttgggattctacaacgacttcaggactgcttgtaagtttctatcccatgtcttttttacagaaagatttattccaatccttacacatcaccaaaggaaatatctgccttgtaaataagtatggcgaggtcctcttctgtgctcaggacagtgaatcttcttttgtattttctctagatctccctaatttaccgcaattccaagcaagaagcccctctgccatagaaattgagaaagcttctggaattcttggtggggagaacctaatcacagtgagtatcaacaagaaacgctacctaggattggtactgaataaaattcctatccaagggacctacactctatctttagttccagtttctgatctcatccaatccgccttgaaagttcctctcaatatttgttttttctatgtacttgctttcctcctcatgtggtggattttctctaagatcaacaccaaacttaacaagcctcttcaagaactgaccttctgtatggaagctgcctggcgaggaaaccataacgtgaggtttgaaccccagccttacggttatgaattcaatgaactaggaaatattttcaattgcactctcctactcttattgaattccattgagaaagcagatatcgattaccattcaggcgaaaaattacaaaaagaattagggattttatcttcactacaaagtgcgttactaagtccggatttccctacgttccctaaagttacctttagttcccaacatctccggagaaggcaactttccggtcattttaatggttggacagttcaagatggtggcgatacccttttagggatcatagggctcgctggcgatattggtcttccttcctatctctatgctttatccgcacggagtctttttcttgcctatgcttcctcggacgtttcgttacaaaaaatcagcaaggatactgccgacagcttctcaaaaacaacagaaggcaatgaggctgtagttgctatgactttcattaaatatgtagaaaaagatcgatctctagagctcctctcgttaagcgagggagctcctaccatgtttctacaacgaggagaatctttcgtacgtctccccttagagactcaccaagctctacagcctggagatcggttgatctgcctcactggaggagaagacatcctcaagtacttttctcagcttcctattgaagagctcttaaaagatcctttaaaccctctaaatacagagaatcttattgattctctaaccatgatgttaaacaacgaaaccgaacattctgcagatggaactctgaccatcctttcattttcataa

SEQ ID NO: 63 - protein, 356 aa, Chlamydia pneumoniae
MKDLGTLGGTSSTAKTVSPDGKVIMGRSQIADGSWHAFMCHTDFSSNNVLFDLDNTYKTLRENGRQLNSIFNLQNMMLQRASDHEFTEFGRSNIALGAGLYVNALQNLPSNLAAQYFGIAYKIRPKYRLGVFLDHNFSSHVPNNFNVSHNRLWMGAFIGWQDSDALGSSVKVSFGYGKQKATITREQLENTEAGSGESHFEGVAAQIEGRYGKSLGGHVRVQPFLGLQFVHITRKEYTENAVQFPVHYDPIDYSTGVVYLGIGSHIALVDSLHVGTRMGMEQNFAAHTDRFSGSIASIGNFVFEKLDVTHTRAFAEMRVNYELPYLQSLNLILRVNQQPLQGVMGFSSDLRYALGF

SEQ ID NO: 64 - DNA, 1071 bp, Chlamydia pneumoniae
atgaaagatttggggactcttgggggtacctcttctacagcaaaaacagtgtccccagatggtaaagtgatcatgggtagatcacaaattgctgatggcagttggcacgcatttatgtgtcatacggatttctcctctaataatgtactctttgatctcgataatacgtataaaactctaagagaaaatggccgtcagctaaattccatattcaacctacaaaatatgatgttacagagagcctcagatcatgagttcacagagtttggaaggagtaacatcgctcttggtgccgggctttatgtgaatgccttgcagaatctccctagcaatttagcagcacaatattttggaatcgcatacaaaatacgtcctaaatatcgtttgggggtgtttttggaccataatttcagctcccacgttcctaataattttaacgtaagccacaatagactctggatgggagcctttattggatggcaggattctgatgctctaggatctagtgtcaaggtgtctttcggatatggaaaacaaaaagccacgattacaagagagcaattagagaatacagaagccgggagtggggagagccattttgaaggggtcgctgctcagatagaagggcggtatggtaagagcctcggaggacatgtcagggtccagcctttcctaggactgcagtttgtccacattacaaggaaagaatataccgaaaatgcagtgcaatttcctgtacactatgatcctatagactattctacaggtgtagtgtatttaggaattggatctcatattgcacttgtagattctttacatgtaggcacacgcatgggaatggagcaaaactttgcagcccatacggacaggttctcaggatctatagcgtctattggaaactttgtgtttgaaaagcttgatgtgactcacacaagggcatttgcggaaatgcgtgtcaactatgagcttccctatctacagtctctgaatcttattctacgagttaatcaacagcctctacaaggggttatgggattttccagtgatcttaggtatgccttaggattctaa

SEQ ID NO: 65 - protein, 112 aa, Chlamydia pneumoniae
MTAVLILTSFPSEESARSLARHLITERLASCVHVFPKGTSTYLWEGKLCESEEHHIQIKSIDIRFSEICLAIQEFSGYEVPEVLLFPIENGDPRYLNWLTILSYPEKPPLSD

SEQ ID NO: 66 - DNA, 339 bp, Chlamydia pneumoniae
atgactgctgttcttattcttacatctttcccttcggaggaaagtgctcgctccttagctagacatctgattacagagcgtcttgcttcctgtgtgcatgtattccctaaaggcacatcgacatatctatgggaaggcaagctatgtgagtctgaagaacatcatatacaaatcaaatcgatagacatacgcttctcggaaatttgtcttgctattcaggagttctctggctatgaggttcctgaagtcttactatttcctattgaaaatggggatccgaggtacttgaattggttaacgattctcagctatccagagaagcctccgctttcagattag

SEQ ID NO: 67 - protein, 344 aa, Chlamydia pneumoniae
MNSKMLKHLRLATLSFSMFFGIVSSPAVYALGAGNPAAPVLPGVNPEQTGWCAFQLCNSYDLFAALAGSLKFGFYGDYVFSESAHITNVPVITSVTTSGTGTTPTITSTTKNVDFDLNNSSISSSCVFATIALQETSPAAIPLLDIAFTARVGGLKQYYRLPLNAYRDFTSNPLNAESEVTDGLIEVQSDYGIVWGLSLQKVLWKDGVSFVGVSADYRHGSSPINYIIVYNKANPEIYFDATDGNLSYKEWSASIGISTYLNDYVLPYASVSIGNTSRKAPSDSFTELEKQFTNFKFKIRKITNFDRVNFCFGTTCCISNNFYYSVEGRWGYQRAINITSGLQF

SEQ ID NO: 68 - DNA, 1035 bp, Chlamydia pneumoniae
atgaatagcaagatgctaaaacatttacgtttagcaaccctttccttctctatgttcttcgggattgtatcttctcccgcagtatatgccctaggggctggaaaccctgcagctccagtactcccaggtgtgaatcctgagcaaacgggatggtgtgccttccaactttgtaatagttacgatctttttgctgctcttgcaggaagcctcaaatttgggttctatggagattatgtcttctcagaaagtgcccatattaccaatgtccctgtcattacctccgttacgacttcaggcacaggaacaacgccaaccattacctctacaactaaaaacgtagactttgatcttaacaacagctccatcagctcgagctgtgtttttgcaaccatagctctacaggaaacatccccagctgccattccccttttagatatagccttcactgcacgtgtcggaggacttaagcagtactaccgcctccctctcaatgcttacagagacttcacttcaaatcctttaaatgcagaatctgaagttacagatggtctcattgaagtccagtcagactatggaattgtctggggtctgagtttacaaaaagtattgtggaaagatggagtgtcttttgtaggggtgagcgctgactaccgtcacggttccagtcccatcaactatatcatcgtttacaacaaggccaaccccgagatctatttcgatgctactgatggaaacctaagctataaagaatggtctgcaagcatcggcatctctacgtatcttaatgactatgtgcttccctatgcatccgtatctataggaaatacttcaagaaaagctccttctgatagcttcacagaactcgaaaagcaatttacgaattttaaatttaaaattcgtaaaatcacaaacttcgacagagtaaacttctgcttcggaactacctgctgcatctcaaataacttctactatagtgtagaaggccgttggggatatcagcgtgctatcaacattacgtcaggtctgcagttttag

SEQ ID NO: 69 - protein, 428 aa, Chlamydia pneumoniae
MDIKKLFCLFLCSSLIAMSPIYGKTGDYEKLTLTGINIIDRNGLSETICSKEKLKKYTKVDFLAPQPYQKVMRMYKNKRGDNVSCLTAYHTNGQIKQYLECLNNRAYGRYREWHVNGNIKIQAEVIGGIADLHPSAESGWLFDQTTFAYNDEGILEAAIVYEKGLLEGSSVYYHTNGNIWKECPYHKGVPQGKFLTYTSSGKLLKEQNYQQGKRHGLSIRYSEDSEEDVLAWEEYHEGRLLKAEYLDPQTHEIYATIHEGNGIQAIYGKYAVIETRAFYRGEPYGKVTRFDNSGTQIVQTYNLLQGAKHGEEFFFYPETGKPKLLLNWHEGILNGIVKTWYPGGTLESCKELVNNKKSGLLTIYYPEGQIMATEEYDNDLLIKGEYFRPGDRHPYSKIDRGCGTAVFFSSAGTITKKIPYQDGKPLLN

SEQ ID NO: 70 - DNA, 1287 bp, Chlamydia pneumoniae
atggatataaaaaaactcttttgcttatttctatgttcttctctaattgccatgagtcccatttatgggaaaacaggtgactatgagaaactcacccttacagggatcaatatcattgatagaaacggcctgtcagaaactatttgctctaaagagaagctaaagaaatacaccaaggtagactttcttgctccccagccctatcaaaaggtcatgaggatgtataaaaacaaacgcggagataacgtttcttgtttaacagcctatcacactaacgggcaaattaagcagtacctggagtgtctcaataatcgtgcttatggaagatatcgtgaatggcacgtcaacgggaatatcaaaatccaagctgaggttatcggaggtattgcggatcttcatccctcagcagagtctggctggctatttgatcaaactacatttgcctataatgatgaaggtatcttagaagccgctatcgtctatgaaaaagggctgctcgaaggatcttcggtgtattaccatactaatgggaatatttggaaagagtgtccctatcataagggagttcctcaaggtaaattcctgacatacacatcttcggggaaactgctcaaagaacagaattaccaacaaggcaaaagacacggtctttcgattcgctacagcgaagattccgaagaagatgttttagcctgggaagaatatcatgagggacgactcctaaaagcagagtacttagatcctcaaactcacgaaatctatgcgactatacacgaagggaacggcattcaagcaatctacggcaagtatgccgttatagaaactagggcattttaccgaggggaaccttatggaaaagttaccagattcgacaactccggaacacagattgtccaaacgtataaccttttgcaaggcgcgaagcacggagaagaatttttcttttatcctgagacagggaaacccaagctgcttcttaattggcatgaaggaattttaaatgggatagtaaaaacttggtatcccggaggaaccttagaaagttgtaaagaactcgtaaataacaaaaaatccgggttactgaccatttactaccctgaaggacagatcatggcgaccgaagagtatgataatgatcttctaattaaaggagagtacttccgccctggagaccgtcatccctactctaaaatagatcgtggttgtgggactgcagtatttttctcgtcggcgggaactattactaaaaaaatcccctatcaggacggcaaacctttgctcaactag

SEQ ID NO: 71 - protein, 651 aa, Chlamydia pneumoniae
MATPAQKSPTFQDPSFVRELGSNHPVFSPLTLEERGEMAIARVQQCGWNHTIVKVSLIILALLTILGGGLLVGLLPAVPMFIGTGLIALGAVIFALALILCLYDSQGLPEELPPVPEPQQIQIEDLRNETREVLEGTLLEVLLKDRDAKDPAVPQVVVDCEKRLGMLDRKLRREEEILYRSTAHLKDEERYEFLLELLEMRSLVADRLEFNRRSYERFVQGIMTVRSEEGEKEISRLQDLISLQQQTVQDLRSRIDDEQKRCWTALQRINQSQKDIQRAHDREASQRACEGTEMDCAERQQLEKDLRRQLKSMQEWIEMRGTIHQQEKAWRKQNAKLERLQEDLRLTGIAFDEQSLFYREYKEKYLSQKLDMQKILQEVNAEKSEKACLESLVHDYEKQLEQKDANLKKAAAVWEEELGKQQQEDYEQTQEIRRLSTFILEYQDSLREAEKVEKDFQELQQRYSRLQEEKQVKEKILEESMNHFADLFEKAQKENMAYKKKLADLEGAAAPTEIGEDDDWVLTDSASLSQKKIRELVEENQELLKALAFKSNELTQLVADAVEAEKEISKLREHIEEQKEGLRALDKMHAQAIKDCEAAQRKCCDLESLLSPVREDAGMRFELEVELQRLQEENAQLRAEVERLEQEQFQG

SEQ ID NO: 72 - DNA, 1956 bp, Chlamydia pneumoniae
atggcaacacccgctcaaaaatcccctacatttcaagatcctagttttgtaagagagctaggcagtaaccaccctgtcttttccccgctaacgcttgaggaaagaggggagatggcaatagctcgagtccagcagtgtggatggaatcatacaattgttaaggtaagtcttattattcttgctcttcttactattttagggggaggattactcgtaggattgctgccagcagttcctatgtttattggaacaggtctgattgctttgggagccgttatatttgctttggctttgattttatgtctttatgattctcagggccttcctgaggaactccctccggttcctgaaccacaacaaattcagattgaagatttaagaaacgagaccagagaagttcttgaagggactcttttagaggttctcttaaaggatagagacgctaaggaccctgcggtgccccaggtggttgtagactgtgaaaagcgtcttggaatgttggatcgtaagctgcgacgtgaagaggagattctgtatcgctcgacggcccatcttaaagacgaggaaaggtatgagttcttgctggagctcttggaaatgcgtagtctggttgccgatcggctagaatttaaccgtagaagttatgagcgatttgttcaaggaattatgacagttagatcagaggagggggaaaaagagatttctcgtctacaagatctaatcagtttgcagcagcagacggtgcaagatttaaggagtcggatcgatgacgagcagaagagatgctggacggctttacaacgtattaaccaatctcagaaggatatacaacgggctcatgatcgcgaggcttcgcagcgtgcctgtgagggcacagagatggattgtgcagaacgccagcaactggagaaggatttaaggagacagctgaaatctatgcaggagtggattgagatgaggggcacaatccatcaacaagagaaggcttggcgtaagcagaatgccaaattagaaagattacaagaggatctgagacttactgggattgcttttgacgaacaatctctgttctatcgcgaatataaagagaaatatctgagtcagaaactagatatgcaaaagattttacaggaagtcaacgcagagaaaagtgagaaggcttgcttagagagtctggtccatgactatgagaagcagctcgaacaaaaagatgctaatctgaagaaagcagcagctgtttgggaagaagaattagggaagcagcaacaggaagactacgaacaaacccaagaaattagacgtctgagtacattcattcttgagtaccaggacagtctgcgtgaggcagaaaaagttgagaaagatttccaagagctacaacaaaggtatagccgtcttcaagaggagaaacaggtaaaagaaaaaatcttagaagaaagtatgaatcattttgccgatctctttgagaaggctcaaaaggaaaacatggcctacaagaagaagttagcggatttagagggtgccgctgctcctactgagatcggtgaggacgatgactgggtactcacagattctgcttctctcagccagaagaagatccgcgaactcgtggaagagaatcaagaactcctgaaagcacttgcatttaaatctaacgaattgactcaactggttgccgatgctgtagaagctgaaaaagaaatcagcaagcttcgagaacacatagaagagcagaaagaaggattacgagctcttgataagatgcatgcacaagcgatcaaagattgcgaagctgctcagagaaaatgctgtgaccttgagagccttctctctcctgttcgagaagatgctggaatgagatttgagctagaggtcgagcttcaaagattgcaagaagaaaatgcacagcttagagcggaggttgaaagactagagcaagagcaatttcaaggataa

SEQ ID NO: 73 - protein, 259 aa, Chlamydia pneumoniae
MIKQIGRFFRAFIFIMPLSLTSCESKIDRNRIWIVGTNATYPPFEYVDAQGEVVGFDIDLAKAISEKLGKQLEVREFAFDALILNLKKHRIDAILAGMSITPSRQKEIALLPYYGDEVQELMVVSKRSLETPVLPLTQYSSVAVQTGTFQEHYLLSQPGICVRSFDSTLEVIMEVRYGKSPVAVLEPSVGRVVLKDFPNLVATRLELPPECWVLGCGLGVAKDRPEEIQTIQQAITDLKSEGVIQSLTKKWQLSEVAYE

SEQ ID NO: 74 - DNA, 780 bp, Chlamydia pneumoniae
atgataaaacaaataggccgtttttttagagcatttatttttataatgcctttatctttaacaagttgtgagtctaaaatcgatcgaaatcgcatctggattgtaggtacgaatgctacatatcctccttttgagtatgtggatgctcagggggaagttgtaggtttcgatatagatttggcaaaggcaattagtgaaaaacttggcaagcaattggaagttagagaattcgctttcgatgctttaattttaaatttaaaaaaacatcgtatcgatgcaattttagcaggaatgtccattactccttcgcgtcagaaggaaatcgccctgcttccctattatggcgatgaggttcaagagctgatggtggtttctaagcggtctttagagacccctgtgcttcccctaacacagtattcttctgttgctgttcagacaggaacgtttcaggagcattatcttttatctcagcccggaatttgtgtccgttcttttgatagcaccttggaggtgattatggaagttcgttatgggaaatctccggttgccgttctagaaccctcggtaggacgtgtcgttcttaaagacttccctaatcttgttgcaacaagattagagctccctcctgaatgttgggtgttgggctgtggtctcggcgtagctaaagatcgtcctgaagaaatacaaacgattcaacaagcgattacagatttaaagagcgaaggggtgattcaatctttaaccaagaaatggcaactttctgaagttgcttacgaatag

SEQ ID NO: 75 - protein, 476 aa, Chlamydia pneumoniae
MMSRLRFRLAALGIFFILLVPNSVSAKTIVASDKEKVGVLVYDNSVEAFQQILDCIDHANFYVELCPCMTGGRTLKEMVDHLEARMDLVPELCSYIIIQPTFTDAEDQKLLKALKERHPNRFFYVFTGCPPSTSILAPNVIEMHIKLSIIDGKYCILGGTNFEEFMCTPGDEVPEKVDNPRLFVSGVRRPLAFRDQDIMLRSTAFGLQLREEYHKQFAMWDYYAHHMWFIDNPEQFAGACPPLTLEQAEETVFPGFDKHEDLVLVDSSKIRIVLGGPHDKQPNPVTQEYLKLIQGARSSVKLAHMYFIPKDELLNALVDVSHNHGVHLSLITNGCHELSPAITGPYAWGNRINYFALLYGKRYPLWKKWFCEKLKPYERVSIYEFAIWETQLHKKCMIIDDEIFVIGSYNFGKKSDAFDYESIVVIESPEVAAKANKVFNKDIGLSIPVSHGDIFSWYFHSVHHTLGHLQLTYMPA

SEQ ID NO: 76 - DNA, 1431 bp, Chlamydia pneumoniae
atgatgagtcggttgcgttttcgcttggcagctcttggaatattttttattttgctggttcctaattctgtttcagcaaagacaatcgtagcttcagacaaggagaaggttggagttcttgtttatgacaatagtgtagaggcctttcaacagatattggattgcatagatcatgcaaatttttatgtagaactgtgtccctgcatgacaggaggccgaacgcttaaagagatggtagatcacctcgaggctcgtatggatctggttccagagctctgtagctatatcattatccaacccacgtttaccgatgctgaagaccaaaaattactcaaagctctcaaagaacgtcatcccaaccggtttttctacgtttttacagggtgcccaccctcaacaagcatcctcgctcctaatgtcattgaaatgcatatcaaactttctatcatcgatgggaaatattgtattttaggtggtaccaattttgaagagtttatgtgcactccaggggatgaggttcctgagaaagtggataacccacgtttatttgtcagtggagtgcgtcggcccctagcatttcgtgatcaggatatcatgttgcgttctacagcattcggtttgcagctcagagaagaatatcataagcaatttgctatgtgggactactatgcacatcatatgtggttcattgataatcctgaacagtttgcaggcgcctgtcctccactgactttagaacaagccgaggagacagtatttcctggatttgacaaacatgaagatcttgttcttgtcgactcttccaagatcaggatagttttaggtggtccccacgataagcaacccaatcctgtgactcaagaatatttgaaacttatccagggagctagatcttctgtgaagcttgctcacatgtatttcatccctaaggacgagcttttaaatgctcttgtcgacgtttctcataatcacggtgttcatctgagtttaattacgaacggctgtcatgaattaagtcctgcaattacaggaccctatgcttggggaaaccgtattaactatttcgccttgctctatgggaaacggtatcctctttggaaaaaatggttttgcgaaaagctaaaaccttatgagcgggtttctatttatgagtttgctatttgggaaacgcagttgcacaagaagtgtatgattatcgatgatgaaatttttgtgatcggaagttataattttggaaagaaaagtgatgcctttgattacgaaagtattgtagttatcgaatctccagaagtcgctgcaaaagctaacaaagtcttcaataaagatatcggattgtcgattcctgtaagtcatggcgacattttctcttggtatttccattccgtacaccacactttgggacatttgcagctgacctatatgccagcctag

SEQ ID NO: 77 - protein, 171 aa, Chlamydia pneumoniae
MKKLLFSTFLLVLGSTSAAHANLGYVNLKRCLEESDLGKKETEELEAMKQQFVKNAEKIEEELTSIYNKLQDEDYMESLSDSASEELRKKFEDLSGEYNAYQSQYYQSINQSNVKRIQKLIQEVKIAAESVRSKEKLEAILNEEAVLAIAPGTDKTTEIIAILNESFKKQN

SEQ ID NO: 78 - DNA, 516 bp, Chlamydia pneumoniae
atgaaaaaattattattttctacatttcttcttgttttaggatcaacaagcgcagctcatgcaaatttaggctatgttaatttaaagcgatgtcttgaagaatccgatctaggtaaaaaggaaactgaagaattggaagctatgaaacagcagtttgtaaaaaatgctgagaaaatagaagaagaactcacttctatttataataagttgcaagatgaagattacatggaaagcctatcggattctgcctctgaagagttgcgaaagaaattcgaagatctttcaggagagtacaatgcgtaccagtctcagtactatcaatctatcaatcaaagtaatgtaaaacgcattcaaaaactcattcaagaagtaaaaatagctgcagaatcagtgcggtccaaagaaaaactagaagctatccttaatgaagaagctgtcttagcaatagcacctgggactgataaaacaaccgaaattattgctattcttaacgaatctttcaaaaaacaaaactag

SEQ ID NO: 79 - protein, 284 aa, Chlamydia pneumoniae
MKQPMSLIFSSVCLGLGLGSLSSCNQKPSWNYHNTSTSEEFFVHGNKSVSQLPHYPSAFRTTQIFSEEHNDPYVVAKTDEESRKIWREIHKNLKIKGSYIPISTYGSLMHPKSAALTLKTYRPHPIWINGYERSFNIDTGKYLKNGSRRRTSHDGPKNRAVLNLIKSSGRRCNAIGLEMTEEDFVIARRREGVYSLYPVEVCSYPQGNPFVIAYAWIADESACSKEVLPVKGYYSLVWESVSSSDSLNAFGDSFAEDYLRSTFLANGTSILCVHESYKKVPPQP

SEQ ID NO: 80 - DNA, 855 bp, Chlamydia pneumoniae
atgaaacagcccatgtctcttatcttttcaagtgtatgtttaggattaggtcttggatctctttcctcctgtaatcaaaagccctcttggaattatcacaacacttcaacgagcgaagaattctttgttcatggaaataagagtgtttcgcaactgcctcattatccttctgcatttcgtacgactcaaatcttttctgaagagcacaatgatccttatgtcgtagctaagactgatgaagagtctcgtaaaatttggagagaaatccataaaaatctcaaaatcaaaggttcttacattcccatatcgacttatggaagtctgatgcacccaaaatcagcagctcttacattaaaaacgtatcgtccacatcctatttggataaatggatacgagcgttcttttaatatagacacaggaaagtacttaaaaaacggaagtcgccgtagaacttctcacgatggtccgaaaaatcgagctgtactgaatctcattaaatcttcgggacgacgctgtaatgctataggccttgagatgacagaagaagactttgtaatagctagaaggcgagaaggtgtttatagcctgtatcccgttgaagtgtgctcgtatcctcaggggaatccttttgtcattgcttatgcctggattgcagatgagagtgcttgctcaaaagaggtcctacctgtaaaagggtactattctttagtctgggaaagcgtttcttcctctgattctctgaatgcttttggagattcctttgcagaggactacctcagaagcacgtttttagcaaacggaacttctatactctgtgttcatgaaagctataagaaagttcctcctcagccctaa

SEQ ID NO: 81 - protein, 365 aa, Chlamydia pneumoniae
MSKKIKVLGHLTLCTLFRGVLCAAALSNIGYASTSQESPYQKSIEDWKGYTFTDLELLSKEGWSEAHAVSGNGSRIVGASGAGQGSVTAVIWESHLIKHLGTLGGEASSAEGISKDGEVVVGWSDTREGYTHAFVFDGRDMKDLGTLGATYSVARGVSGDGSIIVGVSATARGEDYGWQVGVKWEKGKIKQLKLLPQGLWSEANAISEDGTVIVGRGEISRNHIVAVKWNKNAVYSLGTLGGSVASAEAISANGKVIVGWSTTNNGETHAFMHKDETMHDLGTLGGGFSVATGVSADGRAIVGFSAVKTGEIHAFYYAEGEMEDLTTLGGEEARVFDISSEGNDIIGSIKTDAGAERAYLFHIHK

SEQ ID NO: 82 - DNA, 1098 bp, Chlamydia pneumoniae
atgagtaagaagataaaggttctaggtcatttgacgctctgcactctgtttagaggagtgctgtgtgcagcggccctttccaacataggatatgcgagtacttctcaggaatcaccatatcagaagtctatagaagactggaaagggtatacctttacagatcttgagttactgagtaaggaagggtggtctgaagctcatgcagtttctggaaatggcagtagaattgtaggagcttcgggagctggccaaggtagtgtgactgctgtcatatgggaaagtcacctgataaaacatctcggcactttaggtggcgaggcttcatctgcagagggaatttcaaaggatggagaggtggtcgttgggtggtcagatactagagagggatatactcatgcctttgtcttcgacggtagagatatgaaagatctcggtactctaggagctacctattctgtagcaaggggtgtttctggagatggtagtatcatcgtaggagtctctgcaactgctcgtggagaggattacggatggcaagttggtgtcaagtgggaaaaagggaaaatcaaacaattgaagttgttgcctcaaggtctctggtctgaggcgaatgcaatctctgaggatggtacggtgattgtcgggagaggggaaatctctcgcaatcacatcgttgctgtaaaatggaataaaaatgctgtgtatagtttggggactctcggaggtagtgtcgcttcagcagaggctatatcggcaaatgggaaagtaattgtaggatggtccacgactaataatggtgagactcatgcctttatgcacaaagatgagacaatgcacgatctcggcactctaggaggaggtttttctgtcgcaactggagtttctgctgatgggagagccatcgtaggattttcagcagtgaagaccggagaaattcatgctttttactatgcagaaggagaaatggaggatttaacaactttgggaggggaagaagctcgagtgttcgacatatctagcgaaggaaacgatatcattggctctataaaaactgacgctggagctgaacgcgcctatctgttccatatacataaataa

SEQ ID NO: 83 - protein, 1609 aa, Chlamydia pneumoniae
MVAKKTVRSYRSSFSHSVIVAILSAGIAFEAHSLHSSELDLGVFNKQFEEHSAHVEEAQTSVLKGSDPVNPSQKESEKVLYTQVPLTQGSSGESLDLADANFLEHFQHLFEETTVFGIDQKLVWSDLDTRNFSQPTQEPDTSNAVSEKISSDTKENRKDLETEDPSKKSGLKEVSSDLPKSPETAVAAISEDLEISENISARDPLQGLAFFYKNTSSQSISEKDSSFQGIIFSGSGANSGLGFENLKAPKSGAAVYSDRDIVFENLVKGLSFISCESLEDGSAAGVNIVVTHCGDVTLTDCATGLDLEALRLVKDFSRGGAVFTARNHEVQNNLAGGILSVVGNKGAIVVEKNSAEKSNGGAFACGSFVYSNNENTALWKENQALSGGAISSASDIDIQGNCSAIEFSGNQSLIALGEHIGLTDFVGGGALAAQGTLTLRNNAVVQCVKNTSKTHGGAILAGTVDLNETISEVAFKQNTAALTGGALSANDKVIIANNFGEILFEQNEVRNHGGAIYCGCRSNPKLEQKDSGENINIIGNSGAITFLKNKASVLEVMTQAEDYAGGGALWGHNVLLDSNSGNIQFIGNIGGSTFWIGEYVGGGAILSTDRVTISNNSGDVVFKGNKGQCLAQKYVAPQETAPVESDASSTNKDEKSLNACSHGDHYPPKTVEEEVPPSLLEEHPVVSSTDIRGGGAILAQHIFITDNTGNLRFSGNLGGGEESSTVGDLAIVGGGALLSTNEVNVCSNQNVVFSDNVTSNGCDSGGAILAKKVDISANHSVEFVSNGSGKFGGAVCALNESVNITDNGSAVSFSKNRTRLGGAGVAAPQGSVTICGNQGNIAFKENFVFGSENQRSGGGAIIANSSVNIQDNAGDILFVSNSTGSYGGAIFVGSLVASEGSNPRTLTITGNSGDILFAKNSTQTAASLSEKDSFGGGAIYTQNLKIVKNAGNVSFYGNRAPSGAGVQIADGGTVCLEAFGGDILFEGNINFDGSFNAIHLCGNDSKIVELSAVQDKNIIFQDAITYEENTIRGLPDKDVSPLSAPSLIFNSKPQDDSAQHHEGTIRFSRGVSKIPQIAAIQEGTLALSQNAELWLAGLKQETGSSIVLSAGSILRIFDSQVDSSAPLPTENKEETLVSAGVQINMSSPTPNKDKAVDTPVLADIISITVDLSSFVPEQDGTLPLPPEIIIPKGTKLHSNAIDLKIIDPTNVGYENHALLSSHKDIPLISLKTAEGMTGTPTADASLSNIKIDVSLPSITPATYGHTGVWSESKMEDGRLVVGWQPTGYKLNPEKQGALVLNNLWSHYTDLRALKQEIFAHHTIAQRMELDFSTNVWGSGLGVVEDCQNIGEFDGFKHHLTGYALGLDTQLVEDFLIGGCFSQFFGKTESQSYKAKNDVKSYMGAAYAGILAGPWLIKGAFVYGNINNDLTTDYGTLGISTGSWIGKGFIAGTSIDYRYIVNPRRFISAIVSTVVPFVEAEYVRIDLPEISEQGKEVRTFQKTRFENVAIPFGFALEHAYSRGSRAEVNSVQLAYVFDVYRKGPVSLITLKDAAYSWKSYGVDIPCKAWKARLSNNTEWNSYLSTYLAFNYEWREDLIAYDFNGGIRIIF

SEQ ID NO: 84 - DNA, 4830 bp, Chlamydia pneumoniae
atggtagcgaaaaaaacagtacgatcttataggtcttcattttctcattccgtaatagtagcaatattgtcagcaggcattgcttttgaagcacattccttacacagctcagaactagatttaggtgtattcaataaacagtttgaggaacattctgctcatgttgaagaggctcaaacatctgttttaaagggatcagatcctgtaaatccctctcagaaagaatccgagaaggttttgtacactcaagtgcctcttacccaaggaagctctggagagagtttggatctcgccgatgctaatttcttagagcattttcagcatctttttgaagagactacagtatttggtatcgatcaaaagctggtttggtcagatttagatactaggaatttttcccaacccactcaagaacctgatacaagtaatgctgtaagtgagaaaatctcctcagataccaaagagaatagaaaagacctagagactgaagatccttcaaaaaaaagtggccttaaagaagtttcatcagatctccctaaaagtcctgaaactgcagtagcagctatttctgaagatcttgaaatctcagaaaacatttcagcaagagatcctcttcagggtttagcatttttttataaaaatacatcttctcagtctatctctgaaaaggattcttcatttcaaggaattatcttttctggttcaggagctaattcagggctaggttttgaaaatcttaaggcgccgaaatctggggctgcagtttattctgatcgagatattgtttttgaaaatcttgttaaaggattgagttttatatcttgtgaatctttagaagatggctctgccgcaggtgtaaacattgttgtgacccattgtggtgatgtaactctcactgattgtgccactggtttagaccttgaagctttacgtctggttaaagatttttctcgtggaggagctgttttcactgctcgcaaccatgaagtgcaaaataaccttgcaggtggaattctatccgttgtaggcaataaaggagctattgttgtagagaaaaatagtgctgagaagtccaatggaggagcttttgcttgcggaagttttgtttacagtaacaacgaaaacaccgccttgtggaaagaaaatcaagcattatcaggaggagccatatcctcagcaagtgatattgatattcaagggaactgtagcgctattgaattttcaggaaaccagtctctaattgctcttggagagcatatagggcttacagattttgtaggtggaggagctttagctgctcaagggacgcttaccttaagaaataatgcagtagtgcaatgtgttaaaaacacttctaaaacacatggtggagctattttagcaggtactgttgatctcaacgaaacaattagcgaagttgcctttaagcagaatacagcagctctaactggaggtgctttaagtgcaaatgataaggttataattgcaaataactttggagaaattctttttgagcaaaacgaagtgaggaatcacggaggagccatttattgtggatgtcgatctaatcctaagttagaacaaaaggattctggagagaacatcaatattattggaaactccggagctatcacttttttaaaaaataaggcttctgttttagaagtgatgacacaagctgaagattatgctggtggaggcgctttatgggggcataatgttcttctagattccaatagtgggaatattcaatttataggaaatataggtggaagtaccttctggataggagaatatgtcggtggtggtgcgattctctctactgatagagtgacaatttctaataactctggagatgttgtttttaaaggaaacaaaggccaatgtcttgctcaaaaatatgtagctcctcaagaaacagctcccgtggaatcagatgcttcatctacaaataaagacgagaagagccttaatgcttgtagtcatggagatcattatcctcctaaaactgtagaagaggaagtgccaccttcattgttagaagaacatcctgttgtttcttcgacagatattcgtggtggtggggccattctagctcaacatatctttattacagataatacaggaaatctgagattctctgggaaccttggtggtggtgaagagtcttctactgtcggtgatttagctatcgtaggaggaggtgctttgctttctactaatgaagttaatgtttgcagtaaccaaaatgttgttttttctgataacgtgacttcaaatggttgtgattcagggggagctattttagctaaaaaagtagatatctccgcgaaccactcggttgaatttgtctctaatggttcagggaaattcggtggtgccgtttgcgctttaaacgaatcagtaaacattacggacaatggctcggcagtatcattctctaaaaatagaacacgtcttggcggtgctggagttgcagctcctcaaggctctgtaacgatttgtggaaatcagggaaacatagcatttaaagagaactttgtttttggctctgaaaatcaaagatcaggtggaggagctatcattgctaactcttctgtaaatattcaggataacgcaggagatatcctatttgtaagtaactctacgggatcttatggaggtgctatttttgtaggatctttggttgcttctgaaggcagcaacccacgaacgcttacaattacaggcaacagtggggatatcctatttgctaaaaatagcacgcaaacagccgcttctttatcagaaaaagattcctttggtggaggggccatctatacacaaaacctcaaaattgtaaagaatgcagggaacgtttctttctatggcaacagagctcctagtggtgctggtgtccaaattgcagacggaggaactgtttgtttagaggcttttggaggagatatcttatttgaagggaatatcaattttgatgggagtttcaatgcgattcacttatgcgggaatgactcaaaaatcgtagagctttctgctgttcaagataaaaatattattttccaagatgcaattacttatgaagagaacacaattcgtggcttgccagataaagatgtcagtcctttaagtgccccttcattaatttttaactccaagccacaagatgacagcgctcaacatcatgaagggacgatacggttttctcgaggggtatctaaaattcctcagattgctgctatacaagagggaaccttagctttatcacaaaacgcagagctttggttggcaggacttaaacaggaaacaggaagttctatcgtattgtctgcgggatctattctccgtatttttgattcccaggttgatagcagtgcgcctcttcctacagaaaataaagaggagactcttgtttctgccggagttcaaattaacatgagctctcctacacccaataaagataaagctgtagatactccagtacttgcagatatcataagtattactgtagatttgtcttcatttgttcctgagcaagacggaactcttcctcttcctcctgaaattatcattcctaagggaacaaaattacattctaatgccatagatcttaagattatagatcctaccaatgtgggatatgaaaatcatgctcttctaagttctcataaagatattccattaatttctcttaagacagcggaaggaatgacagggacgcctacagcagatgcttctctatctaatataaaaatagatgtatctttaccttcgatcacaccagcaacgtatggtcacacaggagtttggtctgaaagtaaaatggaagatggaagacttgtagtcggttggcaacctacgggatataagttaaatcctgagaagcaaggggctctagttttgaataatctctggagtcattatacagatcttagagctcttaagcaggagatctttgctcatcatacgatagctcaaagaatggagttagatttctcgacaaatgtctggggatcaggattaggtgttgttgaagattgtcagaacatcggagagtttgatgggttcaaacatcatctcacagggtatgccctaggcttggatacacaactagttgaagacttcttaattggaggatgtttctcacagttctttggtaaaactgaaagccaatcctacaaagctaagaacgatgtgaagagttatatgggagctgcttatgcggggattttagcaggtccttggttaataaaaggagcttttgtttacggtaatataaacaacgatttgactacagattacggtactttaggtatttcaacaggttcatggataggaaaagggtttatcgcaggcacaagcattgattaccgctatattgtaaatcctcgacggtttatatcggcaatcgtatccacagtggttccttttgtagaagccgagtatgtccgtatagatcttccagaaattagcgaacagggtaaagaggttagaacgttccaaaaaactcgttttgagaatgtcgccattccttttggatttgctttagaacatgcttattcgcgtggctcacgtgctgaagtgaacagtgtacagcttgcttacgtctttgatgtatatcgtaagggacctgtctctttgattacactcaaggatgctgcttattcttggaagagttatggggtagatattccttgtaaagcttggaaggctcgcttgagcaataatacggaatggaattcatatttaagtacgtatttagcgtttaattatgaatggagagaagatctgatagcttatgacttcaatggtggtatccgtattattttctag

SEQ ID NO: 85 - protein, 277 aa, Chlamydia pneumoniae
MSLYQKWWNSQLKKSLCYSTVAALIFMIPSQESFADSLIDLNLGLDPSVECLSGDGAFSVGYFTKAGSTPVEYQPFKYDVSKKTFTILSVETANQSGYAYGISYDGTITVGTCSLGAGKYNGAKWSADGTLTPLTGITGGTSHTEARAISKDTQVIEGFSYDASGQPKAVQWASGATTVTQLADISGGSRSSYAYAISDDGTIIVGSMESTITRKTTAVKWVNNVPTYLGTLGGDASTGLYISGDGTVIVGAANTATVTNGNQESHAYMYKDNQMKD

SEQ ID NO: 86 - DNA, 834 bp, Chlamydia pneumoniae
gtgagtctatatcaaaaatggtggaacagtcagttaaagaagagcctctgctattcgactgttgctgctctaatatttatgattccttctcaagaatcctttgcagatagtcttatagatttaaatttaggtttagatccttcggtcgaatgtctgtcaggagatggtgcattttctgttgggtattttactaaggcgggatcgactcccgtagaatatcagccgtttaaatacgacgtatctaagaagacattcacaatcctttccgtagaaacggcaaatcagagcggctatgcttacggaatctcctacgatggcacgatcactgtaggaacgtgtagcctaggtgcaggaaaatataacggcgcaaaatggagtgcggatggcactttaacacccttaactggaatcacgggggggacgtcacatacggaagcgcgtgcgatttctaaggatactcaggtgatcgagggtttctcatatgatgcttcagggcaacccaaggctgtgcagtgggcaagcggagcgactacagtaacacaattagcagatatttcaggaggctctagaagctcttatgcgtatgctatatctgatgatggcacgattattgttgggtctatggagagcacgataacaaggaaaactacagctgtaaaatgggtaaataatgttcctacgtatctgggaaccttaggaggagatgcttctacaggtctttatatttctggagacggcaccgtgattgtaggtgcggcaaatacagcaactgtaaccaatgggaatcaggaatcccacgcctatatgtataaagataaccaaatgaaagattga

SEQ ID NO: 87 - protein, 264 aa, Chlamydia pneumoniae
MSNQLQPCISLGCVSYINSFPLSLQLIKRNDIRCVLAPPADLLNLLIEGKLDVALTSSLGAISHNLGYVPGFGIAANQRILSVNLYAAPTFFNSPQPRIAATLESRSSIGLLKVLCRHLWRIPTPHILRFITTKVLRQTPENYDGLLLIGDAALQHPVLPGFVTYDLASGWYDLTKLPFVFALLLHSTSWKEHPLPNLAMEEALQQFESSPEEVLKEAHQHTGLPPSLLQEYYALCQYRLGEEHYESFEKFREYYGTLYQQARL

SEQ ID NO: 88 - DNA, 795 bp, Chlamydia pneumoniae
atgtctaaccaactccagccatgtataagcttaggctgcgtaagttatattaattcctttccgctgtccctacaactcataaaaagaaacgatattcgctgtgttcttgctccccctgcagacctcctcaacttgctaatcgaagggaaactcgatgttgctttgacctcatccctaggagctatctctcataacttggggtatgtccccggctttggaattgcagcaaaccaacgtatcctcagtgtaaacctctatgcagctcccactttctttaactcaccgcaacctcggattgccgcaactttagaaagtcgctcctctataggactcttaaaagtgctttgtcgtcatctctggcgcatcccaactcctcatatcctaagattcataactacaaaagtactcagacaaacccctgaaaattatgatggcctcctcctaatcggagatgcagcgctacaacatcctgtacttcctggatttgtaacctatgaccttgcctcggggtggtatgatcttacaaagctaccttttgtatttgctcttcttctacacagcacctcttggaaagaacatcccctacccaaccttgcgatggaagaagccctccaacagttcgaatcttcacccgaagaagtccttaaagaagctcatcaacatacaggtctgcccccttctcttcttcaagaatactatgccctatgccagtaccgtctaggagaagaacactacgaaagctttgaaaaattccgggaatattatggaaccctctaccaacaagcccgactgtaa

SEQ ID NO: 89 - protein, 759 aa, Chlamydia pneumoniae
MVFSYYCMGLFFFSGAISSCGLLVSLGVGLGLSVLGVLLLLLAGLLLFKIQSMLREVPKAPDLLDLEDASERLRVKASRSLASLPKEISQLESYIRSAANDLNTIKTWPHKDQRLVETVSRKLERLAAAQNYMISELCEISEILEEEEHHLILAQESLEWIGKSLFSTFLDMESFLNLSHLSEVRPYLAVNDPRLLEITEESWEVVSHFINVTSAFKKAQILFKNNEHSRMKKKLESVQELLETFIYKSLKRSYRELGCLSEKMRIIHDNPLFPWVQDQQKYAHAKNEFGEIARCLEEFEKTFFWLDEECAISYMDCWDFLNESIQNKKSRVDRDYISTKKIALKDRARTYAKVLLEENPTTEGKIDLQDAQRAFERQSQEFYTLEHTETKVRLEALQQCFSDLREATNVRQVRFTNSENANDLKESFEKIDKERVRYQKEQRLYWETIDRNEQELREEIGESLRLQNRRKGYRAGYDAGRLKGLLRQWKKNLRDVEAHLEDATMDFEHEVSKSELCSVRARLEVLEEELMDMSPKVADIEELLSYEERCILPIRENLERAYLQYNKCSEILSKAKFFFPEDEQLLVSEANLREVGAQLKQVQGKCQERAQKFAIFEKHIQEQKSLIKEQVRSFDLAGVGFLKSELLSIACNLYIKAVVKESIPVDVPCMQLYYSYYEDNEAVVRNRLLNMTERYQNFKRSLNSIQFNGDVLLRDPVYQPEGHETRLKERELQETTLSCKKLKVAQDRLSELESRLSRR

SEQ ID NO: 90 - DNA, 2280 bp, Chlamydia pneumoniae
ttggtattctcatactattgcatgggattattttttttctctggagctatttctagttgtggtcttttagtgtctctaggagttggtttaggacttagtgttttaggagtacttttacttctcttagcaggtcttttgctttttaagatccaaagtatgcttcgagaggtgcctaaggctcctgatctattagatttagaagatgcaagtgaacggcttagagtaaaggctagccgttctttagcaagcctcccgaaggaaatcagtcagctagagagctacattcgttctgcagctaatgatctaaatacaattaagacttggccgcataaagatcaaagactcgtcgagaccgtgtcacgaaaattagagcgtctggcagctgctcaaaactatatgatttctgaactctgcgagattagtgagattcttgaggaagaggagcatcatctaattttggctcaggaatctctagaatggataggtaagagtctattttctacctttctggacatggaatcttttttaaatttgagccatctatctgaagtgcgtccgtacttagctgtaaatgatcctagattattagaaattaccgaagaatcttgggaagtagtgagtcatttcataaatgtaacgtctgcttttaagaaagctcagattctttttaagaacaacgaacattctcggatgaagaagaagttagaaagtgttcaagagttactggaaacatttatttataagagtttaaagagaagttatcgagaattaggatgcttaagtgaaaagatgagaatcattcacgacaatcctctcttcccttgggtgcaagatcagcagaagtatgctcatgctaagaatgaatttggagagattgcgcggtgtttagaggagtttgaaaagacgttcttctggttggatgaggagtgtgctatttcttacatggactgttgggattttctaaatgagtctattcagaataagaagtccagagtagatcgagattatatatccacgaagaaaattgcattaaaggatagagcccgcacttatgctaaggttcttttagaagagaatccgactacagagggtaaaatagatttgcaagacgctcaaagagcctttgagcgtcaaagtcaggagttttatacactagagcatacggaaacaaaggtgagactagaagcacttcaacagtgcttctcggatcttagggaggcgacgaacgtaaggcaagttaggtttacaaattctgaaaatgcgaatgatttaaaggagagtttcgagaagatagataaagagcgtgtgcgatatcaaaaagagcaaaggctctattgggaaacaatagatcgcaatgagcaagagcttagggaagagattggggagtcgcttcgtttacaaaatcggagaaaagggtatagggctggatatgatgctgggcgtttaaaaggtttgttgcgtcagtggaagaaaaatctccgcgatgtggaagcccaccttgaagatgcaactatggattttgagcatgaagtaagcaagagcgaattgtgcagtgttcgggcgaggctcgaggttctagaagaagagctgatggatatgtctcctaaagttgcggatatagaagagttgttgtcctatgaagagcgttgtattcttcctattagggaaaatttagaaagggcatacctccaatataataagtgttctgaaattttatccaaggcaaagttcttctttccggaagacgagcaattgctagtttcggaagcgaatctaagagaggtgggtgcccagttaaaacaagtacagggaaaatgtcaagagagggcccaaaagttcgcaatatttgaaaagcatattcaggagcagaaaagccttattaaagagcaagtgcggagttttgatctagcgggagttgggtttttaaagagtgagcttcttagtattgcttgtaacctttatataaaggcggttgttaaggagtctataccagttgatgtgccttgtatgcagttatattatagttattacgaagataatgaagctgtagtgcgaaaccgccttttaaatatgacggagaggtatcaaaattttaaaaggagtttgaattccatacaatttaatggtgacgttcttttacgggatccggtctatcaacctgaaggtcatgagaccaggctaaaggaacgggagctacaagaaacaactttgtcttgtaagaaattaaaagtggctcaagatcgtctttctgaattagagtcaaggctgtctaggagatag

SEQ ID NO: 91 - protein, 695 aa, Chlamydia pneumoniae
MKRCFLFLASFVLMGSSADALTHQEAVKKKNSYLSHFKSVSGIVTIEDGVLNIHNNLRIQANKVYVENTVGQSLKLVAHGNVMVNYRAKTLVCDYLEYYEDTDSCLLTNGRFAMYPWFLGGSMITLTPETIVIRKGYISTSEGPKKDLCLSGDYLEYSSDSLLSIGKTTLRVCRIPILFLPPFSIMPMEIPKPPINFRGGTGGFLGSYLGMSYSPISRKHFSSTFFLDSFFKHGVGMGFNLHCSQKQVPENVFNMKSYYAHRLAIDMAEAHDRYRLHGDFCFTHKHVNFSGEYHLSDSWETVADIFPNNFMLKNTGPTRVDCTWNDNYFEGYLTSSVKVNSFQNANQELPYLTLRQYPISIYNTGVYLENIVECGYLNFAFSDHIVGENFSSLRLAARPKLHKTVPLPIGTLSSTLGSSLIYYSDVPEISSRHSQLSAKLQLDYRFLLHKSYIQRRHIIEPFVTFITETRPLAKNEDHYIFSIQDAFHSLNLLKAGIDTSVLSKTNPRFPRIHAKLWTTHILSNTESKPTFPKTACELSLPFGKKNTVSLDAEWIWKKHCWDHMNIRWEWIGNDNVAMTLESLHRSKYSLIKCDRENFILDVSRPIDQLLDSPLSDHRNLILGKLFVRPHPCWNYRLSLRYGWHRQDTPNYLEYQMILGTKIFEHWQLYGVYERREADSRFFFFLKLDKPKKPPF

SEQ ID NO: 92 - DNA, 2088 bp, Chlamydia pneumoniae
atgaaacgttgcttcttatttctagcttcctttgttcttatgggttcctcagctgatgctttgactcatcaagaggctgtgaaaaagaaaaactcctatcttagtcactttaagagtgtttctgggattgtgaccatcgaagatggggtattgaatatccataacaacctgcggatacaagccaataaagtgtatgtagaaaatactgtgggtcaaagcctgaagcttgtcgcacatggcaatgttatggtgaactatagggcaaaaaccctagtttgtgattacctagagtattacgaagatacagactcttgtcttcttactaatggaagattcgcgatgtatccttggtttctaggggggtctatgatcactctaaccccagaaaccatagtcattcggaagggatatatctctacctccgagggtcccaaaaaagacctgtgcctctccggagattacctggaatattcttcagatagtcttctttctatagggaagacaacattaagggtgtgtcgcattccgatacttttcttacctccattttctatcatgcctatggagatccctaagcctccgataaactttcgaggaggaacaggaggatttctgggatcctatttggggatgagctactcgccgatttctaggaagcatttctcctcgacatttttcttggatagctttttcaagcatggcgtcggcatgggattcaacctccattgttctcagaagcaggttcctgagaatgtcttcaatatgaaaagctattatgcccaccgccttgctatcgatatggcagaagctcatgatcgctatcgcctacacggagatttctgcttcacgcataagcatgtaaatttttctggagaataccatctcagcgatagttgggaaactgttgctgacattttccccaacaacttcatgttgaaaaatacaggccccacacgtgtcgattgcacttggaatgacaactattttgaagggtatctcacctcttctgttaaggtaaactctttccaaaatgccaaccaagagctcccttatttaacattaaggcagtacccgatttctatttataatacgggagtgtaccttgaaaacatcgtagaatgtgggtatttaaactttgcttttagcgatcatatcgttggcgagaatttctcttcactacgtcttgctgcgcgccctaagctccataaaactgtgcctctacctataggaacgctctcctccaccctagggagttctctgatttactatagcgatgttcctgagatctcctcgcgccatagtcagctttccgcgaagctacaacttgattatcgctttctattacataagtcctacattcaaagacgccatattatagagccgttcgttaccttcattacagagactcgtcctctagctaagaatgaagatcattatatcttttctattcaagatgcctttcactccttaaaccttctgaaagcgggtatagatacctcggtactgagtaagactaaccctcgattcccgagaatccatgcgaagctgtggactacccacatcttgagcaatacagaaagcaaacccacgtttcccaaaactgcatgcgagctatctctaccttttggaaagaaaaatacagtctccttagatgctgaatggatttggaaaaagcactgttgggatcacatgaacatacgttgggagtggatcggaaatgacaatgtggctatgactctagaatccctgcatagaagcaaatacagcctgattaagtgtgacagggagaacttcattttagatgtcagccgtcccattgaccagcttttagactcccctctctctgatcataggaatctcattttagggaaattatttgtacgacctcatccctgttggaattaccgcttatccttacgctatggctggcatcgccaggacactccgaactacctagaataccagatgattctagggacgaagatcttcgaacattggcagctctatggggtgtatgaacgccgagaagcagatagtcgatttttcttcttcttaaagctcgacaaacctaaaaaacctcccttctaa

SEQ ID NO: 93 - protein, 428 aa, Chlamydia pneumoniae
MFEAVIADIQAREILDSRGYPTLHVKVTTSTGSVGEARVPSGASTGKKEALEFRDTDSPRYQGKGVLQAVKNVKEILFPLVKGCSVYEQSLIDSLMMDSDGSPNKETLGANAILGVSLATAHAAAATLRRPLYRYLGGCFACSLPCPMMNLINGGMHADNGLEFQEFMIRPIGASSIKEAVNMGADVFHTLKKLLHERGLSTGVGDEGGFAPNLASNEEALELLLLAIEKAGFTPGKDISLALDCAASSFYNVKTGTYDGRHYEEQIAILSNLCDRYPIDSIEDGLAEEDYDGWALLTEVLGEKVQIVGDDLFVTNPELILEGISNGLANSVLIKPNQIGTLTETVYAIKLAQMAGYTTIISHRSGETTDTTIADLAVAFNAGQIKTGSLSRSERVAKYNRLMEIEEELGSEAIFTDSNVFSYEDSEE

SEQ ID NO: 94 - DNA, 1287 bp, Chlamydia pneumoniae
atgtttgaagctgtcattgccgatatccaggctagggaaatcttggattctcgcgggtatcccactttacatgttaaagtaaccactagcacaggttctgttggagaagctcgggttccttcaggagcatccacagggaaaaaagaagccttagagtttcgtgatacagattctcctcgttatcaaggcaaaggggttttgcaagctgtaaaaaacgtaaaagaaattctttttcccctcgtcaagggatgtagtgtttatgagcaatccttaattgattctctgatgatggattctgacggctctccgaacaaagaaactctaggggccaatgctattttaggagtctctctagctacagcacatgcagcagcagcaacactacgcagacctctgtatcgttatttaggagggtgttttgcctgcagtcttccctgtcctatgatgaatctgatcaatggaggcatgcatgccgataacggcttggagttccaagaatttatgatccgtcctattggagcctcttccatcaaagaagctgtcaacatgggtgctgacgtttttcatactttgaaaaaattactccatgaaagaggcttatctactggagtgggtgacgaaggaggcttcgccccgaatcttgcttctaatgaagaagctctagagctcctattgctggctattgaaaaagcaggctttactccaggaaaagatatatcgctagccttagactgcgcagcatcctcattctataacgtaaaaacaggcacgtatgatgggaggcactatgaagagcaaatcgcaatcctttctaatttatgtgatcgctatcctatagactccatagaagatggtcttgctgaagaagactatgacgggtgggccttgttaactgaagttcttggagaaaaagtacagattgtgggtgatgacctatttgttacaaatccggaattaatattagagggtattagcaatggattagcgaactctgtgttgattaaaccaaatcagatagggacgcttactgaaacagtgtatgctatcaagcttgcgcaaatggctggctatactacaattatttctcatcgctcaggagaaactacggacactacgattgcagatcttgctgttgccttcaacgccggtcaaatcaaaacaggctctttatcacgttctgagcgtgttgcaaaatacaatagactcatggaaattgaagaagagcttggatccgaagcaattttcacagattctaatgtattttcttacgaggattctgaggaatag

SEQ ID NO: 95 - protein, 928 aa, Chlamydia pneumoniae
MKSQFSWLVLSSTLACFTSCSTVFAATAENIGPSDSFDGSTNTGTYTPKNTTTGIDYTLTGDITLQNLGDSAALTKGCFSDTTESLSFAGKGYSLSFLNIKSSAEGAALSVTTDKNLSLTGFSSLTFLAAPSSVITTPSGKGAVKCGGDLTFDNNGTILFKQDYCEENGGAISTKNLSLKNSTGSISFEGNKSSATGKKGGAICATGTVDITNNTAPTLFSNNIAEAAGGAINSTGNCTITGNTSLVFSENSVTATAGNGGALSGDADVTISGNQSVTFSGNQAVANGGAIYAKKLTLASGGGGVSPFLTIIVQGTTAGNGGAISILAAGECSLSAEAGDITFNGNAIVATTPQTTKRNSIDIGSTAKITNLRAISGHSIFFYDPITANTAADSTDTLNLNKADAGNSTDYSGSIVFSGEKLSEDEAKVADNLTSTLKQPVTLTAGNLVLKRGVTLDTKGFTQTAGSSVIMDAGTTLKASTEEVTLTGLSIPVDSLGEGKKVVIAASAASKNVALSGPILLLDNQGNAYENHDLGKTQDFSFVQLSALGTATTTDVPAVPTVATPTHYGYQGTWGMTWVDDTASTPKTKTATLAWTNTGYLPNPERQGPLVPNSLWGSFSDIQAIQGVIERSALTLCSDRGFWAAGVANFLDKDKKGEKRKYRHKSGGYAIGGAAQTCSENLISFAFCQLFGSDKDFLVAKNHTDTYAGAFYIQHITECSGFIGCLLDKLPGSWSHKPLVLEGQLAYSHVSNDLKTKYTAYPEVKGSWGNNAFNMMLGASSHSYPEYLHCFDTYAPYIKLNLTYIRQDSFSEKGTEGRSFDDSNLFNLSLPIGVKFEKFSDCNDFSYDLTLSYVPDLIRNDPKCTTALVISGASWETYANNLARQALQVRAGSHYAFSPMFEVLGQFVFEVRGSSRIYNVDLGGKFQF

SEQ ID NO: 96 - DNA, 2787 bp, Chlamydia pneumoniae
atgaaatcgcaattttcctggttagtgctctcttcgacattggcatgttttactagttgttccactgtttttgctgcaactgctgaaaatataggcccctctgatagctttgacggaagtactaacacaggcacctatactcctaaaaatacgactactggaatagactatactctgacaggagatataactctgcaaaaccttggggattcggcagctttaacgaagggttgtttttctgacactacggaatctttaagctttgccggtaaggggtactcactttcttttttaaatattaagtctagtgctgaaggcgcagcactttctgttacaactgataaaaatctgtcgctaacaggattttcgagtcttactttcttagcggccccatcatcggtaatcacaaccccctcaggaaaaggtgcagttaaatgtggaggggatcttacatttgataacaatggaactattttatttaaacaagattactgtgaggaaaatggcggagccatttctaccaagaatctttctttgaaaaacagcacgggatcgatttcttttgaagggaataaatcgagcgcaacagggaaaaaaggtggggctatttgtgctactggtactgtagatattacaaataatacggctcctaccctcttctcgaacaatattgctgaagctgcaggtggagctataaatagcacaggaaactgtacaattacagggaatacgtctcttgtattttctgaaaatagtgtgacagcgaccgcaggaaatggaggagctctttctggagatgccgatgttaccatatctgggaatcagagtgtaactttctcaggaaaccaagctgtagctaatggcggagccatttatgctaagaagcttacactggcttccgggggggggggggtatctccttttctaacaataatagtccaaggtaccactgcaggtaatggtggagccatttctatactggcagctggagagtgtagtctttcagcagaagcaggggacattaccttcaatgggaatgccattgttgcaactacaccacaaactacaaaaagaaattctattgacataggatctactgcaaagatcacgaatttacgtgcaatatctgggcatagcatctttttctacgatccgattactgctaatacggctgcggattctacagatactttaaatctcaataaggctgatgcaggtaatagtacagattatagtgggtcgattgttttttctggtgaaaagctctctgaagatgaagcaaaagttgcagacaacctcacttctacgctgaagcagcctgtaactctaactgcaggaaatttagtacttaaacgtggtgtcactctcgatacgaaaggctttactcagaccgcgggttcctctgttattatggatgcgggcacaacgttaaaagcaagtacagaggaggtcactttaacaggtctttccattcctgtagactctttaggcgagggtaagaaagttgtaattgctgcttctgcagcaagtaaaaatgtagcccttagtggtccgattcttcttttggataaccaagggaatgcttatgaaaatcacgacttaggaaaaactcaagacttttcatttgtgcagctctctgctctgggtactgcaacaactacagatgttccagcggttcctacagtagcaactcctacgcactatgggtatcaaggtacttggggaatgacttgggttgatgataccgcaagcactccaaagactaagacagcgacattagcttggaccaatacaggctaccttccgaatcctgagcgtcaaggacctttagttcctaatagcctttggggatctttttcagacatccaagcgattcaaggtgtcatagagagaagtgctttgactctttgttcagatcgaggcttctgggctgcgggagtcgccaatttcttagataaagataagaaaggggaaaaacgcaaataccgtcataaatctggtggatatgctatcggaggtgcagcgcaaacttgttctgaaaacttaattagctttgccttttgccaactctttggtagcgataaagatttcttagtcgctaaaaatcatactgatacctatgcaggagccttctatatccaacacattacagaatgtagtgggttcataggttgtctcttagataaacttcctggctcttggagtcataaacccctcgttttagaagggcagctcgcttatagccacgtcagtaatgatctgaagacaaagtatactgcgtatcctgaggtgaaaggttcttgggggaataatgcttttaacatgatgttgggagcttcttctcattcttatcctgaatacctgcattgttttgatacctatgctccatacatcaaactgaatctgacctatatacgtcaggacagcttctcggagaaaggtacagaaggaagatcttttgatgacagcaacctcttcaatttatctttgcctataggggtgaagtttgagaagttctctgattgtaatgacttttcttatgatctgactttatcctatgttcctgatcttatccgcaatgatcccaaatgcactacagcacttgtaatcagcggagcctcttgggaaacttatgccaataacttagcacgacaggccttgcaagtgcgtgcaggcagtcactacgccttctctcctatgtttgaagtgctcggccagtttgtctttgaagttcgtggatcctcacggatttataatgtagatcttgggggtaagttccaattctag

SEQ ID NO: 97 - protein, 260 aa, Chlamydia pneumoniae
MEEVSEYLQQVENQLESCSKRLTKMETFALGVRLEAKEEIESIILSDVVNRFEVLCRDIEDMLSRVEEIERMLRMAELPLLPIKEALTKAFVQHNSCKEKLTKVEPYFKESPAYLTSEERLQSLNQTLQRAYKESQKVSGLESEVRACREQLKDQVRQFETQGVSLIKEEILFVTSTFRTKFSYHSFRLHVPCMRLYEEYYDDIDLERTRARWMAMSERYRDAFQAFQEMLKEGLVEEAQALRETEYWLYREERKSKKKH

SEQ ID NO: 98 - DNA, 783 bp, Chlamydia pneumoniae
atggaggaggtgtctgagtatcttcagcaagtagaaaatcagttggaatcctgttccaagcgattaaccaagatggaaacttttgccttaggtgtgaggttggaagctaaagaagagatagagtctatcatactttctgatgtagtgaaccgttttgaggttttatgtagagatattgaagatatgctatctcgagtcgaggagatagagcggatgttacgtatggcggagcttcctctacttcctataaaagaagcgcttaccaaggcttttgtacaacataacagctgtaaagagaagttaaccaaggtagagccttactttaaagagagccctgcatatctaactagtgaagagcgattgcagagtttgaatcagactttacaacgtgcgtacaaagagtcccaaaaggtttcaggtttagaatcggaagtgagagcctgtcgagagcagcttaaagatcaagtaagacagtttgaaactcaaggagtgagcttgataaaagaagagattctctttgtgactagtacctttagaactaaatttagctatcattcatttcgattacatgttccttgcatgaggttgtatgaggagtattatgatgacattgatctagagagaactcgagctcgatggatggcgatgtctgagaggtatagagatgcttttcaggcattccaggagatgttgaaggaaggcctagttgaagaagctcaggctcttagagaaaccgagtactggttatatcgagaggagagaaagagtaaaaagaaacattga

SEQ ID NO: 99 - protein, 499 aa, Chlamydia pneumoniae
MVLFHAQASGRNRVKADAIVLPFWHFKDAKNAASFEAEFEPSYLPALENFQGKTGEIELLYSSPKAKEKRIVLLGLGKNEELTSDVVFQTYATLTRVLRKAKCSTVNIILPTISELRLSAEEFLVGLSSGILSLNYDYPRYNKVDRNLETPLSKVTVIGIVPKMADAIFRKEAAIFEGVYLTRDLVNRNADEITPKKLAEVALNLGKEFPSIDTKVLGKDAIAKEKMGLLLAVSKGSCVDPHFIVVRYQGRPKSKDHTVLIGKGVTFDSGGLDLKPGKSMLTMKEDMAGGATVLGILSALAVLELPINVTGIIPATENAIDGASYKMGDVYVGMSGLSVEICSTDAEGRLILADAITYALKYCKPTRIIDFATLTGAMVVSLGEEVAGFFSNNDVLAEDLLEASAETSEPLWRLPLVKKYDKTLHSDIADMKNLGSNRAGAITAALFLQRFLEESSVAWAHLDIAGTAYHEKEEDRYPKYASGFGVRSILYYLENSLSK

SEQ ID NO: 100 - DNA, 1500 bp, Chlamydia pneumoniae
gtggttttatttcatgctcaagcctctgggcgtaatcgtgttaaggcagatgctatagtcctgcccttttggcattttaaggatgcaaaaaatgcagcttcttttgaagccgagtttgaaccctcgtatctccccgctttagaaaactttcaaggaaaaaccggggagattgaactcctttatagtagtcctaaagctaaggaaaaacgcattgtcctcttaggcttagggaaaaatgaagagctcacctctgatgttgttttccaaacctatgcgacactaactcgtgtcttacgtaaagcaaagtgttccacagtcaatatcatcttacctacaatttctgaattgcggctttctgccgaagaattcttagtggggttgtcctcaggaattttgtcattaaactatgactacccacgttataataaggtagatcgtaatcttgaaactcctctttctaaagtcacggttatcggtatcgttcccaaaatggcggatgctatctttaggaaagaagcagccattttcgaaggcgtatatctcactcgagatcttgtgaacaggaatgctgatgaaattacccctaagaaattggcagaggttgctctgaatctgggaaaagagttccctagtattgatactaaggtcttgggaaaagatgccatcgccaaagagaaaatgggactcctattggctgtttccaagggttcttgtgtggatccacactttatcgttgtccgttatcaaggacgtcctaagtctaaagatcacaccgtcttgatagggaaaggggtcacttttgactctggaggtttagacctcaagcctggaaaatccatgcttactatgaaagaagacatggcaggtggggctacagtcctcgggattctctcggcgttagcagttttagagcttcctataaatgtcacggggatcattcctgctacagagaatgctatcgatggcgcctcctataaaatgggagatgtctatgtaggaatgtcggggctttctgttgagatttgtagtaccgatgctgagggacgtcttatcctcgctgatgcgattacatatgctttaaaatattgtaaaccgacacgtattatagattttgcaactctaacaggagctatggtagtctctctaggagaagaggttgcaggtttcttttccaataacgatgttttagctgaagatcttttagaggcgtcagccgaaacctccgagccgttatggagacttcctctagttaagaagtatgataaaacattgcattctgatattgctgatatgaaaaatctaggcagtaaccgtgcaggggctattacagcagcattattcttgcagagatttttggaagaatcttcggtagcttgggcacatcttgatattgcaggtactgcatatcatgaaaaagaagaagaccgttatccaaaatatgcttcaggttttggtgttcgttctattctttattacttagaaaatagtctttctaagtag

SEQ ID NO: 101 - protein, 426 aa, Chlamydia pneumoniae
MTLIFVIIIVWCNAFLIKLCVIMGLQSRLQHCIEVSQNSNFDSQVKQFIYACQDKTLRQSVLKIFRYHPLLKIHDIARAVYLLMALEEGEDLGLSFLNVQQYPSGAVELFSCGGFPWKGLPYPAEHAEFGLLLLQIAEFYEESQAYVSKMSHFQQALFDHQGSVFPSLWSQENSRLLKEKTTLSQSFLFQLGMQIHPEYSLEDPALGFWMQRTRSSSAFVAASGCQSSLGAYSSGDVGVIAYGPCSGDISDCYYFGCCGIAKEFVCQKSHQTTEISFLTSTGKPHPRNTGFSYLRDSYVHLPIRCKITISDKQYRVHAALAEATSAMTFSIFCKGKNCQVVDGPRLRSCSLDSYKGPGNDIMILGENDAINIVSASPYMEIFALQGKEKFWNADFLINIPYKEEGVMLIFEKKVTSEKGRFFTKMN

SEQ ID NO: 102 - DNA, 1281 bp, Chlamydia pneumoniae
ttgactctaatttttgttattattatcgtttggtgcaatgcttttctgatcaaattgtgcgtgataatggggctgcaatccaggttacaacattgtatagaagtgtcccagaattcgaactttgattcacaagtaaaacagtttatctatgcgtgccaagataagacattaaggcagtctgtactcaagattttccgctaccatcctttactaaaaattcatgatattgctcgggccgtctatcttttgatggccttagaagaaggcgaggatttaggcttaagctttttaaatgtacagcagtacccttcaggtgctgtagaactgttttcttgtgggggatttccttggaaaggattaccttatcctgcagaacatgcggaatttggcctactcctgttacagatcgcagagttttatgaagagagtcaggcatacgtctctaaaatgagtcattttcaacaggcactctttgatcaccaagggagcgtctttccctctctctggagccaggagaactctcgactcctaaaagaaaagacaactcttagccaatcgtttctcttccaattaggaatgcaaattcacccagaatacagtcttgaggatcctgcactagggttctggatgcaaagaacgcgttcttcatccgcttttgtagccgcttcaggatgtcaaagtagcttgggagcgtattcctcaggggatgtcggtgttatcgcttatggaccttgctctggagacattagtgattgttattattttggatgttgtggaatcgctaaagagttcgtgtgccaaaaatctcaccaaactacagagatttcttttctcacctctacaggaaagcctcatcccagaaatacgggattttcctaccttcgagattcctatgtacatctgccgatccgctgtaagatcactatttccgacaagcaatatcgcgtgcacgctgcgttggctgaggccacctctgccatgacgttttctattttctgtaaggggaagaattgtcaggttgttgacggccctcgcttgcgctcctgttccctagattcttataaaggtcccggaaacgacattatgattcttggggaaaatgacgcaatcaacattgtttctgcaagtccctatatggaaatttttgctttgcaaggcaaagaaaaattttggaatgcagactttttgattaatattccttacaaagaagagggcgtcatgttaatttttgaaaaaaaagtgacctctgagaaaggaagattctttacgaagatgaattaa

SEQ ID NO: 103 - protein, 660 aa, Chlamydia pneumoniae
MSEHKKSSKIIGIDLGTTNSCVSVMEGGQAKVITSSEGTRTTPSIVAFKGNEKLVGIPAKRQAVTNPEKTLGSTKRFIGRKYSEVASEIQTVPYTVTSGSKGDAVFEVDGKQYTPEEIGAQILMKMKETAEAYLGETVTEAVITVPAYFNDSQRASTKDAGRIAGLDVKRIIPEPTAAALAYGIDKVGDKKIAVFDLGGGTFDISILEIGDGVFEVLSTNGDTLLGGDDFDEVIIKWMIEEFKKQEGIDLSKDNMALQRLKDAAEKAKIELSGVSSTEINQPFITMDAQGPKHLALTLTRAQFEKLAASLIERTKSPCIKALSDAKLSAKDIDDVLLVGGMSRMPAVQETVKELFGKEPNKGVNPDEVVAIGAAIQGGVLGGEVKDVLLLDVIPLSLGIETLGGVMTTLVERNTTIPTQKKQIFSTAADNQPAVTIVVLQGERPMAKDNKEIGRFDLTDIPPAPRGHPQIEVSFDIDANGIFHVSAKDVASGKEQKIRIEASSGLQEDEIQRMVRDAEINKEEDKKRREASDAKNEADSMIFRAEKAIKDYKEQIPETLVKEIEERIENVRNALKDDAPIEKIKEVTEDLSKHMQKIGESMQSQSASAAASSAANAKGGPNINTEDLKKHSFSTKPPSNNGSSEDHIEEADVEIIDNDDK

SEQ ID NO: 104 - DNA, 1983 bp, Chlamydia pneumoniae
atgagtgaacacaaaaaatcaagcaaaattataggtatagacttaggcacaacaaactcctgcgtatctgttatggaaggaggacaagctaaagtaattacatcatccgaaggaacaagaaccacgccatcgatcgttgccttcaaaggtaatgagaaattagtggggattccagcaaaacgtcaagcagtgacaaatccagaaaaaactctcggctctacaaaacgctttattggccgtaagtactctgaagtagcttcggaaatccaaaccgttccttatacagtcacctccggatctaaaggtgatgccgttttcgaagttgatggcaaacaatacactccagaagaaattggcgcacaaatcttaatgaaaatgaaagagacagcagaagcttatctaggcgaaactgtcacagaagcagtgatcaccgtccccgcatacttcaatgattctcaacgagcatccacaaaagatgctggacgcattgcaggtctagatgtaaaacgtatcattccagaacctaccgcagcagctcttgcctacggaatcgataaagtcggtgataaaaaaatcgctgtcttcgaccttggtggaggaacttttgatatctccatcctagaaatcggtgatggcgtcttcgaagttctatctacaaatggagatactctcctcggtggagacgactttgatgaagtcattatcaaatggatgatcgaagaattcaaaaaacaagaaggcattgatcttagcaaagataatatggccttacaaagacttaaagatgctgctgagaaagcaaaaatagaactttcaggagtctcttccacagaaatcaatcagccattcatcacaatggatgcacaaggacctaaacaccttgcattgacactcacacgtgcgcaattcgagaaactcgcagcctctctaatcgaaagaacaaaatctccatgcatcaaagcactcagtgacgcaaaactttccgctaaggatatcgatgatgttctcttagttggaggtatgtcaagaatgcccgcagtgcaagaaactgtaaaagaactcttcggcaaagagcctaataaaggagtcaaccccgacgaagttgttgctattggagccgcaattcaaggtggtgttcttggcggagaagttaaggatgttctacttctagacgttatccccctatctctgggtatcgaaactctaggaggcgtcatgacgactctggtagagagaaatactacaatccctacacagaaaaaacaaatcttctccacagctgctgataaccagcctgcggttaccatcgtagttctccaaggagagcgtcccatggccaaagataacaaggaaatcggaagattcgatcttacagatatccctccggctcctcgaggccatcctcaaatcgaagtctccttcgatatcgatgcaaacggaattttccatgtctcagctaaagatgttgccagcggtaaagaacagaaaattcgtatcgaagcaagctcaggacttcaagaagatgaaatccaaagaatggttcgagatgccgaaattaataaggaagaagataaaaaacgtcgtgaagcttcagatgctaaaaatgaagccgatagcatgatcttcagagccgaaaaagctattaaagattataaggagcaaattcctgaaactttagttaaagaaatcgaagagcgaatcgaaaacgtgcgcaacgcactcaaagatgacgctcctattgaaaaaattaaagaggttactgaagacctaagcaagcatatgcaaaaaattggagagtctatgcaatcgcagtctgcatcagcagcagcatcatcggcagccaatgctaaaggtggacctaacatcaatacagaagatttgaaaaaacatagtttcagtacgaagcctccttcaaataacggttcttcagaagaccatatcgaagaagctgatgtagaaattattgataacgacgataagtaa

SEQ ID NO: 105 - protein, 364 aa, Chlamydia pneumoniae
MNVPDSKNLHPPAYELLEIKARITQSYKEASAILTAIPDGILLLSETGHFLICNSQAREILGIDENLEILNRSFTDVLPDTCLGFSIQEALESLKVPKTLRLSLCKESKEKEVELFIRKNEISGYLFIQIRDRSDYKQLENAIERYKNIAELGKMTATLAHEIRNPLSGIVGFASILKKEISSPRHQRMLSSIISGTRSLNNLVSSMLEYTKSQPLNLKIINLQDFFSSLIPLLSVSFPNCKFVREGAQPLFRSIDPDRMNSVVWNLVKNAVETGNSPITLTLHTSGDISVTNPGTIPSEIMDKLFTPFFTTKREGNGLGLAEAQKIIRLHGGDIQLKTSDSAVSFFIIIPELLAALPKERAAS

SEQ ID NO: 106 - DNA, 1091 bp, Chlamydia pneumoniae
atgaacgtccctgattccaagaacctccatcctcctgcatacgaactcctagagatcaaggctcgcatcacacaatcttataaagaagcgagtgctatactgacagcgattcctgatggtatcctattactttctgaaacaggacactttcttatctgcaattcacaagcacgtgaaattctaggaattgatgaaaatctagaaattcttaatagatcctttaccgatgttctccccgatacgtgtcttggattttctattcaagaggctcttgaatctctaaaagtccctaaaactcttagactctctctctgtaaagaatctaaagaaaaagaagtggaactcttcatccgtaaaaacgagatcagtggatacctgtttatccaaatccgcgatcggtccgactataaacaactagaaaacgctatagaaagatataaaaatatcgcagaacttgggaaaatgacggctaccctagctcacgaaatccgcaatccgctaagtggaatcgttggatttgcctctatcctaaagaaagagatttcctctcctcgccaccaacgaatgctctcctcaatcatctccggcacaaggtctctaaataaccttgtctcttctatgttagaatatacaaaatcacaaccgttgaacctaaagattataaatttacaagacttcttctcttctcttatccctctgctctccgtctctttcccgaattgcaagtttgtaagagagggcgcacaacctctattcagatctatagatcctgatcggatgaacagtgtcgtttggaacctagtgaaaaatgctgtagaaacagggaactctccgatcactctgaccctgcatacatcgggagacatctcggtaacgaaccccggaacgattccttccgagatcatggacaagctcttcactccattcttcacaacaaagagagagggaaatggtttgggacttgctgaagctcaaaaaattataagactccatggaggagatatccaattaaaaacaagcgactccgccgttagcttcttcataatcatccccgaacttctagcggccctacccaaagaaagagccgctag

SEQ ID NO: 107 - protein, 357 aa, Chlamydia pneumoniae
MMKKIRKVALAVGGSGGHIVPALSVKEAFSREGIDVLLLGKGLKNHPSLQQGISYREIPSGLPTVLNPIKIMSRTLSLCSGYLKARKELKIFDPDLVIGFGSYHSLPVLLAGLSHKIPLFLHEQNLVPGKVNQLFSRYARGIGVNFSPVTKHFRCPAEEVFLPKRSFSLGSPMMKRCTNHTPTICVVGGSQGAQILNTCVPQALVKLVNKYPNMYVHHIVGPKSDVMKVQHVYNRGEVLCCVKPFEEQLLDVLLAADLVISRAGATILEEILWAKVPGILIPYPGAYGHQEVNAKFFVDVLEGGTMILEKELTEKLLVEKVTFALDSHNREKQRNSLAAYSQQRSTKTFHAFICECL

SEQ ID NO: 108 - DNA, 1074 bp, Chlamydia pneumoniae
atgatgaagaaaattcgaaaagtagccttggctgtaggaggttcaggaggccacattgtcccagctctctcggtaaaggaagctttttctcgtgaaggaatagacgtattactactagggaaaggtctcaagaaccatccttctttgcaacagggaatcagctatcgggaaatcccctcaggacttcctacagtccttaatcccataaagatcatgagcaggaccctttctctatgttcaggatacctgaaagcaagaaaggaacttaaaatttttgaccctgacctggtcataggatttgggagctaccactctcttcccgtgttgctcgcaggactgtcccataaaattcccttatttctacacgaacaaaatctagttcctggaaaagtaaatcaattgttttcccgctatgctcgaggtattggagtgaatttctcccccgttactaaacacttccgctgccccgcagaagaggtcttccttcctaaacgaagcttctccttaggaagccctatgatgaagcgatgtacaaatcatacccctacaatctgtgttgttggaggttctcagggagcacagatattaaatacttgtgttccccaagctcttgtcaagctagtcaataagtacccaaatatgtacgtccatcatattgtaggacctaaaagtgatgttatgaaggtgcaacatgtttacaatcgtggagaggtcctctgctgtgtgaagccgttcgaagagcaactcctagatgtcttgcttgccgcagatttggtcatcagtagggcaggagccacaattttagaagaaattctttgggcaaaagttcccggaattttaattccctatccaggagcttatggacatcaggaagttaatgctaaattctttgtagacgtcttagaagggggaactatgatcctagaaaaagaattaacagagaagctattagtagaaaaagtaacgtttgctttagactcccataacagagaaaaacaacgcaattccctagcggcgtatagtcagcaaaggtcaacaaaaacattccatgcattcatttgtgaatgcttatag

SEQ ID NO: 109 - protein, 335 aa, Chlamydia pneumoniae
MVRRSISFCLFFLMTLLCCTSCNSRSLIVHGLPGREANEIVVLLVSKGVAAQKLPQAAAATAGAATEQMWDIAVPSAQITEALAILNQAGLPRMKGTSLLDLFAKQGLVPSELQEKIRYQEGLSEQMASTIRKMDGVVDASVQISFTTENEDNLPLTASVYIKHRGVLDNPNSIMVSKIKRLIASAVPGLVPENVSVVSDRAAYSDITINGPWGLTEEIDYVSVWGIILAKSSLTKFRLIFYVLILILFVISCGLLWVIWKTHTLIMTMGGTKGFFNPTPYTKNALEAKKAEGAAADKEKKEDADSQGESKNAETSDKDSSDKDAPEGSNEIEGA

SEQ ID NO: 110 - DNA, 1008 bp, Chlamydia pneumoniae
atggttcgtcgatctatttctttttgcttgttctttctaatgacattgctgtgctgtacaagctgtaacagcaggtctctaattgtgcacggtcttcctggcagagaagcgaatgagattgtggtgcttttggtaagcaaaggggtggctgcacaaaaattgcctcaagctgcagcggctacagccggagcagctactgagcaaatgtgggatatcgcggttccgtcagcacaaatcacagaggcccttgccattctaaatcaagcgggtcttccacgtatgaaagggacaagcctgttagatctttttgcaaaacaaggtcttgttccttccgagcttcaggaaaaaatccgttatcaagaaggcttatcagaacagatggcctctacgattagaaaaatggatggcgttgtcgatgcctcagtacagatttccttcactacagaaaatgaagataatcttcctttaacagcctctgtgtatattaagcatcgaggggttttggacaatccgaacagcattatggtttccaaaattaagcgccttattgcaagtgctgttccaggacttgtgccagagaacgtctctgtagtgagcgatcgcgcagcttatagtgatattacaattaatggtccttggggattaacagaagaaatcgattatgtttctgtttggggtattattcttgcgaagtcttcgctcaccaaattccgtctcattttttatgtcttgattctcattttatttgttatttcttgtggtctcctttgggtcatttggaaaactcatactctcattatgactatgggaggtacaaaagggttcttcaaccctacaccatatacaaagaatgccttggaagccaagaaagccgagggagcagctgctgacaaagagaaaaaagaagatgcagattcacagggggaaagcaaaaatgcggaaaccagtgataaagactctagtgataaagatgctccagaaggaagcaatgaaattgagggtgcttag

SEQ ID NO: 111 - protein, 488 aa, Chlamydia pneumoniae
MITKQLRSWLAVLVGSSLLALPLSGQAVGKKESRVSELPQDVLLKEISGGFSKVATKATPAVVYIESFPKSQAVTHPSPGRRGPYENPFDYFNDEFFNRFFGLPSQREKPQSKEAVRGTGFLVSPDGYIVTNNHVVEDTGKIHVTLHDGQKYPATVIGLDPKTDLAVIKIKSQNLPYLSFGNSDHLKVGDWAIAIGNPFGLQATVTVGVISAKGRNQLHIADFEDFIQTDAAINPGNSGGPLLNIDGQVIGVNTAIVSGSGGYIGIGFAIPSLMANRIIDQLIRDGQVTRGFLGVTLQPIDAELAACYKLEKVYGALVTDVVKGSPADKAGLKQEDVIIAYNGKEVDSLSMFRNAVSLMNPDTRIVLKVVREGKVIEIPVTVSQAPKEDGMSALQRVGIRVQNLTPETAKKLGIAPETKGILIISVEPGSVAASSGIAPGQLILAVNRQKVSSIEDLNRTLKDSNNENILLMVSQGDVIRFIALKPEE

SEQ ID NO: 112 - DNA, 1467 bp, Chlamydia pneumoniae
atgataactaagcaattgcgttcgtggctagctgtacttgttggttcaagtctgctagctcttcctttatcagggcaagctgtcgggaaaaaagaatctcgagtttccgagctgcctcaagacgttcttcttaaagagatctcgggagggttttctaaggtcgctaccaaggcgactcccgctgttgtgtacatagaaagtttcccaaagagccaggctgtaacacatccttctcctggacgccgtgggccttatgaaaatccttttgattattttaatgatgagtttttcaatcgtttttttggtctaccttcacagagggaaaaacctcaaagtaaagaggcggttcgaggaacaggtttcctagtatctccagatggctatattgtgactaataaccatgttgtcgaagatacaggtaagattcacgtaactcttcatgatgggcaaaagtacccagcaactgtaatcggactcgatcctaaaacagaccttgcagtcattaaaattaaatcccaaaacctcccgtatctttcttttggaaactccgaccacttaaaagtcggagattgggcaattgcaattggaaatcccttcggtcttcaagctacggtcaccgtaggtgtcatcagtgctaaaggaagaaatcaactccacattgcagattttgaagattttattcagacagatgctgcgattaatccaggcaactctggaggccctcttctaaatattgatggacaggtcatcggtgttaatactgccattgtcagtggtagtggtggctatattggaatcgggtttgcgattcctagccttatggcaaatagaatcatagatcagctgattcgtgatggtcaagttacccgaggattcttaggagtgactttacaacctatagatgcggaactcgctgcttgctacaaactcgaaaaggtttatggcgctttagtcacagatgttgttaaaggatctccagcagataaagcagggctaaaacaagaagatgtgatcattgcttataatgggaaagaagtcgattcactgagtatgttccgtaatgctgtttctttaatgaatccagatacacgtattgttctaaaggtagttcgtgaaggaaaggttatcgaaatacccgtgacagtttctcaagctccaaaagaagatggaatgtcggctttacagcgtgtgggaatccgtgtgcaaaacctaactcctgaaactgctaagaagctgggaattgctccagagactaaaggcattttgattataagtgttgaaccagggtctgtagcagcttcttcaggaattgctcctggtcagctgatccttgctgtgaatagacaaaaagtatcttcgattgaagatctgaatagaacgttaaaagattctaacaatgagaatattcttcttatggtttctcaaggagatgttattcgcttcattgccctgaaacctgaagaataa

SEQ ID NO: 113 - protein, 180 aa, Chlamydia pneumoniae
MCNSIAMKKQKRGFVLMELLMSFTLIALLLGTLGFWYRKIYTVQKQKERIYNFYIEESRAYKQLRTLFSMSLSSSYEEPGSLFSLIFDRGVYRDPKLAGAVRASLHHDTKDQRLELRICNIKDQSYFETQRLLSHVTHVVLSFQRNPDPEKLPETIALTITREPKAYPPRTLTYQFAVGK

SEQ ID NO: 114 - DNA, 543 bp, Chlamydia pneumoniae
atgtgtaactctatagctatgaaaaagcaaaagcgtggctttgtgcttatggaattactcatgtcgttcactctaattgctttgttattagggactttaggattttggtatcggaaaatttatactgtacaaaagcaaaaagaacgtatttataacttttatatcgaagaaagccgagcctacaagcagctcagaaccctgtttagcatgtccttgtcttcatcttacgaggagcctggatcattattttctttaatctttgatcggggtgtttatcgagatcctaagctggcaggtgcggtacgagcttctctccatcatgacaccaaggatcagagattggaacttcgtatttgtaatattaaggatcagtcttactttgaaacacagcgactgctctcccacgtgacccatgttgtactttccttccagagaaatcctgatcctgaaaaacttcctgaaacaattgctttaactataacacgggaacctaaagcatatcctccaaggacgttaacataccaatttgcggttgggaaataa

SEQ ID NO: 115 - protein, 928 aa, Chlamydia pneumoniae
MKTSIPWVLVSSVLAFSCHLQSLANEELLSPDDSFNGNIDSGTFTPKTSATTYSLTGDVFFYEPGKGTPLSDSCFKQTTDNLTFLGNGHSLTFGFIDAGTHAGAAASTTANKNLTFSGFSLLSFDSSPSTTVTTGQGTLSSAGGVNLENIRKLVVAGNFSTADGGAIKGASFLLTGTSGDALFSNNSSSTKGGAIATTAGARIANNTGYVRFLSNIASTSGGAIDDEGTSILSNNKFLYFEGNAAKTTGGAICNTKASGSPELIISNNKTLIFASNVAETSGGAIHAKKLALSSGGFTEFLRNNVSSATPKGGAISIDASGELSLSAETGNITFVRNTLTTTGSTDTPKRNAINIGSNGKFTELRAAKNHTIFFYDPITSEGTSSDVLKINNGSAGALNPYQGTILFSGETLTADELKVADNLKSSFTQPVSLSGGKLLLQKGVTLESTSFSQEAGSLLGMDSGTTLSTTAGSITITNLGINVDSLGLKQPVSLTAKGASNKVIVSGKLNLIDIEGNIYESHMFSHDQLFSLLKITVDADVDTNVDISSLIPVPAEDPNSEYGFQGQWNVNWTTDTATNTKEATATWTKTGFVPSPERKSALVCNTLWGVFTDIRSLQQLVEIGATGMEHKQGFWVSSMTNFLHKTGDENRKGFRHTSGGYVIGGSAHTPKDDLFTFAFCHLFARDKDCFIAHNNSRTYGGTLFFKHSHTLQPQNYLRLGRAKFSESAIEKFPREIPLALDVQVSFSHSDNRMETHYTSLPESEGSWSNECIAGGIGLDLPFVLSNPHPLFKTFIPQMKVEMVYVSQNSFFESSSDGRGFSIGRLLNLSIPVGAKFVQGDIGDSYTYDLSGFFVSDVYRNNPQSTATLVMSPDSWKIRGGNLSRQAFLLRGSNNYVYNSNCELFGHYAMELRGSSRNYNVDVGTKLRF

SEQ ID NO: 116 - DNA, 2787 bp, Chlamydia pneumoniae
atgaagacttcgattccttgggttttagtttcctccgtgttagctttctcatgtcacctacagtcactagctaacgaggaacttttatcacctgatgatagctttaatggaaatatcgattcaggaacgtttactccaaaaacttcagccacaacatattctctaacaggagatgtcttcttttacgagcctggaaaaggcactcccttatctgacagttgttttaagcaaaccacggacaatcttaccttcttggggaacggtcatagcttaacgtttggctttatagatgctggcactcatgcaggtgctgctgcatctacaacagcaaataagaatcttaccttctcagggttttccttactgagttttgattcctctcctagcacaacggttactacaggtcagggaacgctttcctcagcaggaggcgtaaatttagaaaatattcgtaaacttgtagttgctgggaatttttctactgcagatggtggagctatcaaaggagcgtctttccttttaactggcacttctggagatgctctttttagtaacaactcttcatcaacaaagggaggagcaattgctactacagcaggcgctcgcatagcaaataacacaggttatgttagattcctatctaacatagcgtctacgtcaggaggcgctatcgatgatgaaggcacgtcgatactatcgaacaacaaatttctatattttgaagggaatgcagcgaaaactactggcggtgcgatctgcaacaccaaggcgagtggatctcctgaactgataatctctaacaataagactctgatctttgcttcaaacgtagcagaaacaagcggtggcgccatccatgctaaaaagctagccctttcctctggaggctttacagagtttctacgaaataatgtctcatcagcaactcctaaggggggtgctatcagcatcgatgcctcaggagagctcagtctttctgcagagacaggaaacattacctttgtaagaaatacccttacaacaaccggaagtaccgatactcctaaacgtaatgcgatcaacataggaagtaacgggaaattcacggaattacgggctgctaaaaatcatacaattttcttctatgatcccatcacttcagaaggaacctcatcagacgtattgaagataaataacggctctgcgggagctctcaatccatatcaaggaacgattctattttctggagaaaccctaacagcagatgaacttaaagttgctgacaatttaaaatcttcattcacgcagccagtctccctatccggaggaaagttattgctacaaaagggagtcactttagagagcacgagcttctctcaagaggccggttctctcctcggcatggattcaggaacgacattatcaactacagctgggagtattacaatcacgaacctaggaatcaatgttgactccttaggtcttaagcagcccgtcagcctaacagcaaaaggtgcttcaaataaagtgatcgtatctgggaagctcaacctgattgatattgaagggaacatttatgaaagtcatatgttcagccatgaccagctcttctctctattaaaaatcacggttgatgctgatgttgatactaacgttgacatcagcagccttatccctgttcctgctgaggatcctaattcagaatacggattccaaggacaatggaatgttaattggactacggatacagctacaaatacaaaagaggccacggcaacttggaccaaaacaggatttgttcccagccccgaaagaaaatctgcgttagtatgcaataccctatggggagtctttactgacattcgctctctgcaacagcttgtagagatcggcgcaactggtatggaacacaaacaaggtttctgggtttcctccatgacgaacttcctgcataagactggagatgaaaatcgcaaaggcttccgtcatacctctggaggctacgtcatcggtggaagtgctcacactcctaaagacgacctatttacctttgcgttctgccatctctttgctagagacaaagattgttttatcgctcacaacaactctagaacctacggtggaactttattcttcaagcactctcataccctacaaccccaaaactatttgagattaggaagagcaaagttttctgaatcagctatagaaaaattccctagggaaattcccctagccttggatgtccaagtttcgttcagccattcagacaaccgtatggaaacgcactatacctcattgccagaatccgaaggttcttggagcaacgagtgtatagctggtggtatcggcctagaccttccttttgttctttccaacccacatcctcttttcaagaccttcattccacagatgaaagtcgaaatggtttatgtatcacaaaatagcttcttcgaaagctctagtgatggccgtggttttagtattggaaggctgcttaacctctcgattcctgtgggtgcgaaattcgtgcagggggatatcggagattcctacacctatgatctctcaggattctttgtttccgatgtctatcgtaacaatccccaatctacagcgactcttgtgatgagcccagactcttggaaaattcgcggtggcaatctttcaagacaggcatttttactgaggggtagcaacaactacgtctacaactccaattgtgagctcttcggacattacgctatggaactccgtggatcttcaaggaactacaatgtagatgttggtaccaaactccgattctag

SEQ ID NO: 117 - protein, 254 aa, Chlamydia pneumoniae
MHDALLSILAIQELDIKMIRLMRVKKEHQKELAKVQSLKSDIRRKVQEKELEMENLKTQIRDGENRIQEISEQINKLENQQAAVKKMDEFNALTQEMTTANKERRSLEHQLSDLMDKQAGGEDLIVSLKESLASTENSSSVIEKEIFESIKKINEEGKALLEQRTELKHATNPELLSIYERLLNNKKDRVVVPIENRVCSGCHIVLTPQHENLVRKKDRLIFCEHCSRILYWQESQVNAQENSTAKRRRRRAAV

SEQ ID NO: 118 - DNA, 765 bp, Chlamydia pneumoniae
atgcatgacgcacttctaagcattttggctattcaagagcttgatattaaaatgattcgccttatgcgcgtaaagaaagaacatcagaaagaattggctaaagtccaatctttaaaaagtgatattcgtagaaaagttcaggaaaaagaactcgaaatggagaatttgaaaactcaaattcgagatggagagaatcgcatccaagagatttctgaacaaatcaataaattagaaaatcagcaagctgctgtaaaaaaaatggatgagtttaacgctcttacccaagaaatgactacagcaaacaaagaacgtcgctctttagagcaccagcttagcgatctcatggataagcaagctggaggcgaagaccttattgtctctctaaaagaaagcttagcttctacagaaaatagtagcagtgtcattgaaaaagaaatttttgaaagcatcaaaaagattaatgaagaaggcaaagctttgcttgaacaacggacagagttaaagcatgcgacgaatcccgaactactcagcatctatgagcgtctattaaacaataaaaaagatcgcgttgttgttcctattgaaaatcgtgtctgcagtggttgtcatattgttctaactcctcaacacgaaaatcttgtaagaaagaaagaccgactcattttttgcgaacattgctctcgaattctctattggcaagaatcccaagtcaatgctcaggaaaattccacagcaaaacgtcgtcgtcgtcgcgcagctgtataa

SEQ ID NO: 119 - protein, 1723 aa, Chlamydia pneumoniae
MKWLPATAVFAAVLPALTAFGDPASVEISTSHTGSGDPTSDAALTGFTQSSTETDGTTYTIVGDITFSTFTNIPVPVVTPDANDSSSNSSKGGSSSSGATSLIRSSNLHSDFDFTKDSVLDLYHLFFPSASNTLNPALLSSSSSGGSSSSSSSSSSGSASAVVAADPKGGAAFYSNEANGTLTFTTDSGNPGSLTLQNLKMTGDGAAIYSKGPLVFTGLKNLTFTGNESQKSGGAAYTEGALTTQAIVEAVTFTGNTSAGQGGAIYVKEATLFNALDSLKFEKNTSGQAGGGIYTESTLTISNITKSIEFISNKASVPAPAPEPTSPAPSSLINSTTIDTSTLQTRAASATPAVAPVAAVTPTPISTQETAGNGGAIYAKQGISISTFKDLTFKSNSASVDATLTVDSSTIGESGGAIFAADSIQIQQCTGTTLFSGNTANKSGGGIYAVGQVTLEDIANLKMTNNTCKGEGGAIYTKKALTINNGAILTTFSGNTSTDNGGAIFAVGGITLSDLVEVRFSKNKTGNYSAPITKAASNTAPVVSSSTTAASPAVPAAAAAPVTNAAKGGALYSTEGLTVSGITSILSFENNECQNQGGGAYVTKTFQCSDSHRLQFTSNKAADEGGGLYCGDDVTLTNLTGKTLFQENSSEKHGGGLSLASGKSLTMTSLESFCLNANTAKENGGGANVPENIVLTFTYTPTPNEPAPVQQPVYGEALVTGNTATKSGGGIYTKNAAFSNLSSVTFDQNTSSENGGALLTQKAADKTDCSFTYITNVNITNNTATGNGGGIAGGKAHFDRIDNLTVQSNQAKKGGGVYLEDALILEKVITGSVSQNTATESGGGIYAKDIQLQALPGSFTITDNKVETSLTTSTNLYGGGIYSSGAVTLTNISGTFGITGNSVINTATSQDADIQGGGIYATTSLSINQCNTPILFSNNSAATKKTSTTKQIAGGAIFSAAVTIENNSQPIIFLNNSAKSEATTAATAGNKDSCGGAIAANSVTLTNNPEITFKGNYAETGGAIGCIDLTNGSPPRKVSIADNGSVLFQDNSALNRGGAIYGETIDISRTGATFIGNSSKHDGSAICCSTALTLAPNSQLIFENNKVTETTATTKASINNLGAAIYGNNETSDVTISLSAENGSIFFKNNLCTATNKYCSIAGNVKFTAIEASAGKAISFYDAVNVSTKETNAQELKLNEKATSTGTILFSGELHENKSYIPQKVTFAHGNLILGKNAELSVVSFTQSPGTTITMGPGSVLSNHSKEAGGIAINNVIIDFSEIVPTKDNATVAPPTLKLVSRTNADSKDKIDITGTVTLLDPNGNLYQNSYLGEDRDITLFNIDNSASGAVTATNVTLQGNLGAKKGYLGTWNLDPNSSGSKIILKWTFDKYLRWPYIPRDNHFYINSIWGAQNSLVTVKQGILGNMLNNARFEDPAFNNFWASAIGSFLRKEVSRNSDSFTYHGRGYTAAVDAKPRQEFILGAAFSQVFGHAESEYHLDNYKHKGSGHSTQASLYAGNIFYFPAIRSRPILFQGVATYGYMQHDTTTYYPSIEEKNMANWDSIAWLFDLRFSVDLKEPQPHSTARLTFYTEAEYTRIRQEKFTELDYDPRSFSACSYGNLAIPTGFSVDGALAWREIILYNKVSAAYLPVILRNNPKATYEVLSTKEKGNVVNVLPTRNAARAEVSSQIYLGSYWTLYGTYTIDASMNTLVQMANGGIRFVF

SEQ ID NO: 120 - DNA, 5172 bp, Chlamydia pneumoniae
atgaagtggctaccagctacagctgtttttgctgccgtactccccgcactaacagccttcggagatcccgcgtctgttgaaataagtaccagccatacaggatccggggatcctacaagcgacgctgccttaacaggatttacacaaagttccacagaaactgacggtactacctataccattgtcggtgatatcaccttctctacttttacgaatattcctgttcccgtagtaactccagacgccaacgatagttccagcaatagctctaaaggaggaagtagcagtagtggagctacatctctaatccgatcctcaaacctacactccgattttgattttacaaaagatagcgtgttagacctctatcaccttttctttccttcagcttcaaatactctcaatcctgcactcctttcttccagtagcagcggtggatcctcgagcagcagtagctcctcatcatctggaagtgcatctgctgttgttgctgcggacccaaaaggaggcgctgccttttatagtaacgaggctaacggaactttaaccttcactacagactctggaaatcccggctccctgactcttcagaatcttaaaatgaccggagatggagccgccatctactcgaagggtcctctagtatttactggtttaaaaaatctaacctttacaggaaatgaatctcagaaatctggaggtgctgcctatactgaaggcgcactcacaacacaagcaatcgttgaagccgtaacttttactggcaacacctcggcagggcaaggaggcgctatctatgttaaagaagctaccctattcaatgctctagacagcctcaaatttgaaaaaaacacttctgggcaagctggtggtggaatctatacagagtctacgctcacaatctcgaacatcacaaaatctattgaatttatctctaataaagcttctgtccctgcccccgctcctgagcccacctctccggctccaagtagcttaataaattctacaacgatcgatacctcgactctccaaacccgagcagcatccgcaactccagcagtggctcctgttgctgccgtaactccaacaccaatctctactcaagagaccgcaggaaatggaggcgctatctatgctaaacaaggtatttcgatatccacgtttaaagatctgaccttcaagtctaactctgcatcggtagatgccacccttactgtcgattctagcactattggagaatctggaggtgctatctttgcagcagactctatacaaatccaacagtgcacgggaaccaccttattcagtggcaatactgccaataagtctggtgggggtatttacgctgtaggacaagtcaccctagaagatatagcgaatctgaagatgaccaacaacacctgtaaaggtgaaggtggagccatctacactaaaaaggctttaactatcaacaacggtgccattctcactacattttctggaaatacatcgacagataatggtggggctatttttgctgtaggtggcatcactctctctgatcttgtagaagtccgctttagtaaaaataagaccggaaattattccgctcctattaccaaagcggctagcaacacagctcctgtagtttctagctctacaactgctgcatctcctgcggtccctgctgccgctgcagcacctgttacaaacgcagcaaaaggaggggctttatatagtacagaaggactgactgtatctggaatcacatcgatattgtcgtttgaaaacaacgaatgccagaatcaaggaggtggggcttacgttactaaaaccttccagtgttccgattctcatcgcctccagtttactagtaataaagcagcagatgaaggcgggggcctgtattgtggtgacgatgtcacgctaacgaacctgacagggaaaacactatttcaagagaatagcagtgagaaacatggaggtgggctctctctcgcctcaggaaaatctctgactatgacatcgttagagagcttctgcttaaatgcaaatacagcaaaggaaaacggaggcggtgcgaatgtccctgaaaatattgtactcaccttcacctatactcccactccaaatgaacctgcgcctgtgcagcagcccgtgtatggagaagctcttgttactggaaatacagccacaaaaagtggtgggggcatttacacgaaaaatgcggccttctcaaatttatcttctgtaacttttgatcaaaatacctcttcagaaaatggtggtgccttacttacccaaaaagctgcagataaaacggactgttctttcacctatattacaaatgtcaatatcaccaacaatacagctacaggaaatggtgggggcattgctgggggaaaagcacatttcgatcgcattgataatcttacagtccaaagcaaccaagcaaagaaaggtggtggggtttatcttgaagatgccctcatcctggaaaaggttattacaggttctgtctcacaaaatacagctacagaaagtggtgggggtatctacgctaaggatattcaactacaagctctacctggaagcttcacaattaccgataataaagtcgaaactagtcttactactagcactaatttatatggtgggggcatctattccagtggagctgtcacgctaaccaatatatctggaacctttggcattacaggaaactctgttatcaatacagcgacatcccaggatgcagatatacaaggtgggggcatttatgcaaccacgtctctctcaataaatcaatgtaatacacccattctatttagcaacaactctgctgccactaaaaaaacatcaacaacaaagcaaattgctggtggggctatcttctccgctgcagtaactatcgagaataactctcagcccattattttcttaaataattccgcaaagtcggaagcaactacagcagcaactgcaggaaataaagatagctgtggaggagccattgcagctaactctgttactttaacaaataaccctgaaataacctttaaaggaaattatgcagaaactggaggagcgattggctgtattgatcttactaatggctcacctccccgtaaagtctctattgcagacaacggttctgtcctttttcaagacaactctgcgttaaatcgcggaggcgctatctatggagagactatcgatatctccaggacaggtgcgactttcatcggtaactcttcaaaacatgatggaagtgcaatttgctgttcaacagccctaactcttgcgccaaactcccaacttatctttgaaaacaataaggttacggaaaccacagccactacaaaagcttccataaataatttaggagctgcaatttatggaaataatgagactagtgacgtcactatctctttatcagctgagaatggaagtattttctttaaaaacaatctatgcacagcaacaaacaaatactgcagtattgctggaaacgtaaaatttacagcaatagaagcttcagcagggaaagctatatctttctatgatgcagttaacgtttccaccaaagaaacaaatgctcaagagctaaaattaaatgaaaaagcgacaagtacaggaacgattctattttctggggaacttcacgaaaataaatcctatattccacagaaagtcactttcgcacatgggaatctcattctaggtaaaaatgcagaacttagcgtagtttcctttacccaatctccaggcaccacaatcactatgggcccaggatcggttctttccaaccatagcaaagaagcaggaggaatcgctataaacaatgtcatcattgattttagtgaaatcgttcctactaaagataatgcaacagtagctccacccactcttaaattagtatcgagaactaatgcagatagtaaagataagattgatattacaggaactgtgactcttctagatcctaatggcaacttatatcaaaattcttatcttggtgaagaccgcgatatcactcttttcaatatagacaattctgcaagtggggcagttacagccacgaatgtcacccttcaagggaatttaggagctaaaaaaggatatttaggaacctggaatttggatccaaattcctcgggttcaaaaattattctaaaatggacctttgacaaatacctgcgctggccctacatccctagagacaaccacttctacatcaactctatttggggagcacaaaactctttagtgactgtgaaacaagggatcttagggaacatgttgaacaatgcaaggtttgaagatcctgctttcaacaacttctgggcttcggctataggatctttccttaggaaagaagtatctcgaaattctgactcattcacctatcatggcagaggctataccgctgctgtggatgccaaacctcgccaagaatttattttaggagctgccttcagtcaggtttttggtcacgccgagtctgaatatcaccttgacaactataagcataaaggctcaggtcactctacacaagcatctctttatgctggcaatatcttctattttcctgcgatacggtctcggcctattctattccaaggtgtggcgacctatggttatatgcaacatgacaccacaacctactatccttctattgaagaaaaaaatatggcaaactgggatagcattgcttggttatttgatctgcgtttcagtgtggatcttaaagaacctcaacctcactctacagcaaggcttaccttctatacagaagctgagtataccagaattcgccaggagaaattcacagagctagactatgatcctagatctttctctgcatgctcttatggaaacttagcaattcctactggattctctgtagacggagcattagcttggcgtgagattattctatataataaagtatcagctgcgtacctccctgtgattctcaggaataatccaaaagcgacctatgaagttctctctacaaaagaaaagggcaacgtagtcaacgttctccctacaagaaacgcagctcgtgcagaggtgagctctcaaatttatcttggaagttactggacactctacggcacgtatactattgatgcttcaatgaatactttagtgcaaatggccaacggagggatccggtttgtattctag

SEQ ID NO: 121 - protein, 373 aa, Chlamydia pneumoniae
MSIAIAREQYAAILDMHPKPSIAMFSSEQARTSWEKRQAHPYLYRLLEIIWGVVKFLLGLIFFIPLGLFWVLQKICQNFILLGAGGWIFRPICRDSNLLRQAYAARLFSASFQDHVSSVRRVCLQYDEVFIDGLELRLPNAKPDRWMLISNGNSDCLEYRTVLQGEKDWIFRIAEESQSNILIFNYPGVMKSQGNITRNNVVKSYQACVRYLRDEPAGPQARQIVAYGYSLGASVQAEALSKEIADGSDSVRWFVVKDRGARSTGAVAKQFIGSLGVWLANLTHWNINSEKRSKDLHCPELFIYGKDSQGNLIGDGLFKKETCFAAPFLDPKNLEECSGKKIPVAQTGLRHDHILSDDVIKEVAGHIQRHFDN

SEQ ID NO: 122 - DNA, 1121 bp, Chlamydia pneumoniae
atgtcaatagctattgcaagggaacaatacgcagctatattggatatgcatcctaaaccttcgatcgccatgttttcttcggagcaggcgagaacttcttgggagaaacgacaggctcatccttacctttatcgtcttcttgagatcatatggggtgttgtgaaatttcttctcggcttaatcttctttattcccttgggtcttttctgggtccttcagaagatatgtcagaattttattcttcttggtgcaggagggtggatttttagacccatatgcagggactctaatttattgcgacaagcttacgccgcgcgtcttttctccgcttcattccaagatcatgtctcctctgtgcgaagggtttgcttacagtatgacgaggtctttattgacggattggagttacgtcttcccaatgctaagccagatcgatggatgttaatctccaatggaaactccgattgcttagagtataggacagtgctgcaaggggaaaaggactggatattccgtattgctgaagagtctcaatccaacattttaatcttcaattacccaggagtcatgaagagccaagggaatataacaagaaacaatgtagtcaaatcttatcaagcatgcgtacgctatcttagagatgaacccgcaggacctcaggcgcgtcaaatcgttgcttatggctattctttaggagctagtgttcaagccgaagcattaagtaaagagatcgcagacggaagtgatagcgtccgttggtttgtcgttaaagatcgaggagctcgctctacaggagccgttgctaaacagtttattggaagtctaggagtttggctggcgaatcttacccattggaatattaattctgaaaagagaagcaaggacttgcattgcccagaactctttatttatggcaaggattcccaaggtaatcttatcggggatggattgttcaaaaaagagacgtgcttcgcagcaccatttttagatcctaaaaacttggaagagtgttcagggaagaaaatccctgtagctcagaccggtctaagacacgatcatatcctttccgatgatgtgattaaagaagttgcaggtcatattcaaagacatttcgataatta

SEQ ID NO: 123 - protein, 980 aa, Chlamydia pneumoniae
MYSCYSKGISHNYLLHPMSRLDIFVFDSLIANQDQNLLEEIFCSEDTVLFKAYRTTALQSPLAAKNLNIARKVANYILADNGEIDTVKLVEAIHHLSQCTYPLGPHRHNEAQDREHLLKMLKALKENPKLKESIKTLFVPSYSTIQNLIRHTLALNPQTILSTIHVRQAALTALFTYLRQDVGSCFATAPAILIHQEYPERFLKDLNDLISSGKLSRIVNQREIAVPINLSGCIGELFKPLRILDLYPDPLVKLSSSPGLKKAFSAANLIETLGDSEAQIQQLLSHQYLMQKLQNVHETLTANDIIKSTLLHYYQLQESTVRAIFFKEGLFSKEQVAFSTQHPRELSEIQRVYHYLHAYEEAKSAFIHDTQNPLLKAWEYTLATLADASQPTISNHIRLALGWKSEDPHSLVSLVTHFVEEEVENIRILVQQCEQTYHEARSQLEYIEGRMRNPLNNQDSQILTMDHMRFRQELNKALYEWDSAQEKAKKFLHLPEFLLSFYTKQIPLYFRSSYDAFIQEFAHLYANAPAGFRILFTHGRTHPNTWSPIYSINEFIRFLSEFFTSTESELLGKHAVINLEKETSRLVHNITAMLHTDVFQEALLTRILEAYQLPVPPSILNHLDQLSQTPWVYVSGGTVDTLLLDYFESSEPLTLTEKHPENPHELAAFYADALKDLPTGIKSYLEEGSHSLLSSSPTHVFSIIAGSPLFREAWDNDWYSYTWLRDVWVKQHQDFLQDTILPQLSIYAFIENFCNKYALQHVVHDFHDFCSDHSLTLPELYDKGSRFLSSLFTKDKTVALIYIRRLLYLMVREVPYVSEQQLPEVLDNVSSYLGISSRITYEKFRSLIEETIPKMTLLSSADLRHIYKGLLMQSYQKIYTEEDTYLRLTTAMRHHNLAYPAPLLFADSNWPSIYFGFILNPGTTEIDLWKFNYAGLQGQPLDNIQELFATSRPWTLYANPIDYGMPPPPGYRSRLPKEFF

SEQ ID NO: 124 - DNA, 2943 bp, Chlamydia pneumoniae
atgtattcgtgttacagcaaaggaatatcccataactatcttctacatcctatgtcacgtttggatatttttgttttcgattctctgatcgcaaaccaggatcaaaatcttcttgaggaaattttctgttctgaagacacagttttatttaaagcctaccgtactacggctctacaatcccctctagctgctaagaacctaaatatcgcccgtaaagtcgcaaattatatcttagctgacaatggggaaatcgatacagtaaagcttgtcgaagccattcaccatctctcacaatgtacctatcctttagggcctcatcgccataatgaagctcaagatcgtgaacacctccttaaaatgctaaaagctctaaaggaaaatcctaaattaaaagaaagcatcaaaactctctttgtcccttcatactctacaatccaaaacctaattcgccatacactagcattgaatccacagacaattctctctacgattcatgtgcgtcaagcagcactcacagcgctcttcacctaccttcggcaagatgtaggttcctgttttgctacggctcctgccattctcattcaccaagaatatccagaacgattccttaaagatctcaatgatctcattagcagtggcaaactctctagaatcgtaaaccaaagggaaattgcggttcctataaacctttcgggatgcattggagagctattcaagcctttaaggattctagatctttatcctgatcctctggttaagctctcctcatctccaggactcaaaaaagccttttctgctgccaatcttattgaaactcttggggattctgaagcacaaatccaacagttgctctcgcatcaatatttgatgcaaaaactacaaaatgtccatgagaccttaactgctaacgacattatcaaatcgacacttctgcactactatcagctccaagaaagtactgtacgagctattttcttcaaagaagggttgttcagcaaagaacaagtggcattctcgacgcaacaccccagagagctctcagaaatacaacgggtataccactacttacatgcctatgaagaagcaaaatctgcttttatccatgacactcaaaatcccttactgaaagcctgggagtatactttagcgactcttgcggatgctagccaacctaccatctcaaaccatatccgccttgccttaggatggaaaagtgaagaccctcacagtcttgtatctctagttacacactttgttgaagaggaagtagaaaacatccgaattttagtccaacaatgtgaacagacctatcacgaagcacgctcccaactagaatatattgaagggcggatgcgcaacccactaaataatcaagacagtcagattttgacgatggatcacatgcgcttccgtcaagaactcaataaagctctttatgagtgggatagtgctcaagaaaaggcaaagaaatttctacatcttcctgaattcttactttctttctatacaaagcaaattcccttatactttcgtagttcttacgatgccttcattcaagaatttgctcatctctatgctaatgctcccgctggcttccgtattcttttcacgcatggacgcacccatccgaacacatggtcccccatctattcgattaatgaatttatacgttttctttctgaattcttcacctccacagagtcagaacttctggggaaacatgccgtgatcaatttagagaaagaaacatctcggctcgtccacaacatcactgccatgctacacacggatgttttccaagaagctctccttacaagaattttagaagcctatcagcttcctgtgcctccctccatcttaaaccacttagatcagctgtcacaaactccctgggtttatgtttctggaggaacagtggacactcttcttttggattattttgaaagctcagaacctctgacacttacagaaaagcatcctgaaaatcctcatgagcttgcagctttctacgcagacgcccttaaagatctccctacaggaattaaaagttatctagaagaaggatcccactctctacttagctcatcacccacccacgttttctctataatcgcaggatctcctttatttcgggaagcttgggataatgattggtacagctatacctggcttcgtgatgtctgggtgaaacaacaccaagatttccttcaagatactatattacctcagctaagtatctatgctttcatagagaatttttgtaacaaatatgctttgcaacatgtagttcatgactttcatgatttctgctccgaccactccttgactcttccggagctctatgacaaaggatcgcgttttctaagctccttattcaccaaagataagaccgtagctcttatctatatacgccgtcttctctaccttatggtccgtgaagtcccttatgtttcagaacaacagcttccagaagtcttagataacgtctcttcatatctcgggatttcctctcgtattacctatgagaaattccgctccctgatagaggaaaccatccctaaaatgaccttactctcctcagcagacctgaggcatatctataaaggtctcctcatgcaaagttatcaaaagatctacaccgaagaagatacgtacctccgcctcaccacggcaatgaggcatcataatcttgcctatcccgctcctttgctctttgcagacagtaactggccttctatttattttggattcatcctaaatccaggaaccacagagatcgatctttggaaatttaactatgcagggctgcaaggacagcctcttgacaatatccaggagctgttcgcaacgtcaagaccctggaccctctatgcaaatcctatagattatggcatgccaccgcctccaggctaccgcagccgcctccctaaagaatttttctag

SEQ ID NO: 125 - protein, 674 aa, Chlamydia pneumoniae
MSIVRNSALPLPCLSRSETFKKVRSHMKFMKVLTPWIYRKDLWVTAFLLTAIPGSFAHTLVDIAGEPRHAAQATGVSGDGKIVIGMKVPDDPFAITVGFQYIDGHLQPLEAVRPQCSVYPNGITPDGTVIVGTNYAIGMGSVAVKWVNGKVSELPMLPDTLDSVASAVSADGRVIGGNRNINLGASVAVKWEDDVITQLPSLPDAMNACVNGISSDGSIIVGTMVDVSWRNTAVQWIGDQLSVIGTLGGTTSVASAISTDGTVIVGGSENADSQTHAYAYKNGVMSDIGTLGGFYSLAHAVSSDGSVIVGVSTNSEHRYHAFQYADGQMVDLGTLGGPESYAQGVSGDGKVIVGRAQVPSGDWHAFLCPFQAPSPAPVHGGSTVVTSQNPRGMVDINATYSSLKNSQQQLQRLLIQHSAKVESVSSGAPSFTSVKGAISKQSPAVQNDVQKGTFLSYRSQVHGNVQNQQLLTGAFMDWKLASAPKCGFKVALHYGSQDALVERAALPYTEQGLGSSVLSGFGGQVQGRYDFNLGETVVLQPFMGIQVLHLSREGYSEKNVRFPVSYDSVAYSAATSFMGAHVFASLSPKMSTAATLGVERDLNSHIDEFKGSVSAMGNFVLENSTVSVLRPFASLAMYYDVRQQQLVTLSVVMNQQPLTGTLSLVSQSSYNLSF

SEQ ID NO: 126 - DNA, 2025 bp, Chlamydia pneumoniae
atgagtatagtcagaaattctgcattgccacttccgtgtttaagcagatccgaaacctttaaaaaagttaggtcgcatatgaaatttatgaaagtccttactccatggatttatcgaaaagatctttgggtaacagcattcttactgacagcaattccaggatcttttgcacatactcttgttgatatagcaggagaacctcggcatgctgctcaagcaacaggagtttctggagatggtaaaattgttataggaatgaaagttccggatgatccttttgctataactgtaggatttcaatatattgatgggcatttgcaacccttagaggcagtacgtcctcaatgctctgtataccctaatggtataaccccggacggaacggttattgtgggtacaaactatgccatcgggatgggtagtgttgctgtgaaatgggtaaatggcaaggtttctgaacttcccatgctccctgacaccctcgattctgtagcatcggcagtttctgcagatggaagagtgattggagggaatagaaatataaatcttggcgcttctgttgctgtgaaatgggaggacgacgtgattacacaacttccttctcttcctgatgctatgaatgcttgtgttaacggaatttcttcagatggttctataattgtaggaaccatggtagacgtgtcatggagaaataccgcagtacaatggatcggggatcagctctctgttattgggactttaggaggaactacttctgttgctagtgcaatctcaacagatggcactgtgattgtaggaggttctgaaaatgcagattctcagactcatgcctatgcttataaaaacggtgttatgagcgatatagggaccctcggaggtttttattctttagcacatgcagtatcttcagatggttctgtgattgtaggagtatccacgaactctgagcatagatatcatgcattccaatatgctgatggacagatggtagatttaggaactttaggagggcctgaatcttatgctcaaggtgtgtctggagatggaaaggtaattgtgggtagagcacaagtaccatctggagattggcatgcgttcctatgtcctttccaagctccgagccctgctcctgtccatgggggaagcactgtcgtaactagccagaatccacgtggaatggtagatatcaatgctacgtactcctctttgaaaaatagccaacaacaactacaaagattgcttatccagcatagtgcaaaagttgaaagtgtatcctcaggagcaccatcttttacaagtgtgaaaggtgcgatctcaaaacagagccctgcagtgcaaaatgatgtacagaaagggacgtttttaagttaccgttcccaagttcatggaaacgtgcagaatcagcaattgctcacaggagcttttatggactggaaactcgcttcagctcctaaatgcggctttaaagtagctctccactatggctctcaagatgctctcgtagaacgtgcagctcttccttacacagaacaaggcttaggaagcagtgtcttgtcaggttttggaggacaagttcaaggacgctatgactttaatttaggagaaactgttgttctgcaaccctttatgggcattcaagttctccacctaagtagagaagggtattctgagaagaatgttcgatttcctgtaagctatgattctgtagcctactcagcagctactagctttatgggtgcgcatgtatttgcctccctaagccctaaaatgagtacagcagcaactttaggtgtggagagagatctgaattcacatatagatgaatttaagggatccgtctctgctatgggaaactttgtcttggaaaattctacagtgagtgttttaagaccttttgcttctcttgctatgtactatgacgtaagacaacagcaactcgtgacgttgtcagtagttatgaatcaacaacccttaacaggcacactaagcttagtaagccaaagtagctataatcttagcttctaa

SEQ ID NO: 127 - protein, 527 aa, Chlamydia pneumoniae
MLRFFAVFISTLWLITSGCSPSQSSKGIFVVNMKEMPRSLDPGKTRLIADQTLMRHLYEGLVEEHSQNGEIKPALAESYTISEDGTRYTFKIKNILWSNGDPLTAQDFVSSWKEILKEDASSVYLYAFLPIKNARAIFDDTESPENLGVRALDKRHLEIQLETPCAHFLHFLTLPIFFPVHETLRNYSTSFEEMPITCGAFRPVSLEKGLRLHLEKNPMYHNKSRVKLHKIIVQFISNANTAAILFKHKKLDWQGPPWGEPIPPEISASLHQDDQLFSLPGASTTWLLFNIQKKPWNNAKLRKALSLAIDKDMLTKVVYQGLAEPTDHILHPRLYPGTYPERKRQNERILEAQQLFEEALDELQMTREDLEKETLTFSTFSFSYGRICQMLREQWKKVLKFTIPIVGQEFFTIQKNFLEGNYSLTVNQWTAAFIDPMSYLMIFANPGGISPYHLQDSHFQTLLIKITQEHKKHLRNQLIIEALDYLEHCHILEPLCHPNLRIALNKNIKNFNLFVRRTSDFRFIEKL

SEQ ID NO: 128 - DNA, 1584 bp, Chlamydia pneumoniae
atgctccgtttcttcgctgtatttatatcaactctttggctcattacctcaggatgttccccatcccaatcctctaaaggaatttttgtggtaaatatgaaggaaatgccacgctccttggatcctggaaaaactcgtctcattgcagaccaaactctaatgcgtcatctatatgaaggactcgtcgaagaacattcccaaaatggagagattaaaccagcccttgcagaaagctacaccatctccgaagacgggactcggtacacatttaaaatcaaaaacatcctttggagtaacggagaccctctgacagctcaagactttgtctcctcttggaaggaaatcctaaaggaagatgcgtcctccgtatatctctatgcgtttttacctatcaaaaatgctcgggcaatctttgatgatactgagtctccagaaaatctaggagtccgagctttagataagcgtcatctcgaaattcagttagaaactccctgcgcgcatttcctacatttcttgactcttcctatttttttccctgttcatgaaactctgcgaaactatagcacctcttttgaagagatgcccattacctgcggtgctttccgccctgtgtctctagaaaaaggcctgagactccatctagagaaaaaccctatgtaccataataaaagccgtgtgaaactacataaaattattgtacagtttatctcaaacgctaacactgcagccattctattcaaacataagaaattagattggcaaggacctccttggggagaacctatccctccagaaatctcagcttctctacatcaagatgaccagctcttttctcttccgggcgcttcgactacatggttactctttaatatacaaaaaaaaccttggaacaatgctaaattacgcaaggcattgagccttgcaatagacaaagatatgttaaccaaagtggtataccaaggtcttgcagaacctacagatcatatcctacatccaagactttatccagggacctatcccgaacggaaaagacaaaacgaaagaattcttgaggctcaacaactctttgaagaagctctagacgaacttcaaatgacacgcgaagatctagaaaaggaaactttgactttctcaaccttttctttttcttacggaaggatttgccaaatgctaagagaacaatggaagaaagtcttaaaatttactatccctatagtaggccaagagtttttcacaatacaaaaaaacttcctagaggggaactattccctaaccgtgaaccaatggaccgcagcatttattgatccgatgtcttatctcatgatctttgccaatcctggaggaatttccccctatcacctccaagattcacactttcaaactcttctcataaagatcactcaagaacataaaaaacacctacgaaatcagcttattattgaagcccttgactatttagaacactgtcacattctcgaaccactatgtcatccaaatcttcgaattgctttgaacaaaaacattaaaaactttaatctttttgttcgacgaacttcagactttcgttttatagaaaaactatag

SEQ ID NO: 129 - protein, 215 aa, Chlamydia pneumoniae
MRKMLVLLASLGLLSPTLSSCTHLGSSGSYHPKLYTSGSKTKGVIAMLPVFHRPGKSLEPLPWNLQGEFTEEISKRFYASEKVFLIKHNASPQTVSQFYAPIANRLPETIIEQFLPAEFIVATELLEQKTGKEAGVDSVTASVRVRVFDIRHHKIALIYQEIIECSQPLTTLVNDYHRYGWNSKHFDSTPMGLMHSRLFREVVARVEGYVCANYS

SEQ ID NO: 130 - DNA, 648 bp, Chlamydia pneumoniae
atgcgaaaaatgttggtattattggcatctttaggacttctatccccaaccctatccagctgcactcacttaggctcttcaggaagttatcatcctaagctatacacttcagggagcaaaactaaaggtgtgattgcgatgcttcctgtatttcatcgcccaggaaagagtcttgaacctttaccttggaacctccaaggagaatttactgaagagatcagcaaaaggttttatgcttcggaaaaggtcttcctgatcaagcacaatgcttcacctcagacagtctctcagttctatgctccgattgcgaatcgtctacccgaaacaattattgagcaatttcttcctgcagaattcattgttgctacagaactgttagaacaaaagacagggaaagaagcaggtgtcgattctgtaacagcgtctgtacgtgttcgcgtttttgatatccgtcatcataaaatagctctcatttatcaagagattatcgaatgcagccagcctttaactaccctagtcaatgattatcatcgctatggctggaactcaaaacattttgattcaacgcccatgggcttaatgcatagccgtcttttccgcgaagttgttgccagagttgagggctatgtttgtgctaactactcgtag

SEQ ID NO: 131 - protein, 323 aa, Chlamydia pneumoniae
MKQLLFCVCVFAMSCSAYASPRRQDPSVMKETFRNNYGIIVSGQEWVKRGSDGTITKVLKNGATLHEVYSGGLLHGEITLTFPHTTALDVVQIYDQGRLVSRKTFFVNGLPSQEELFNEDGTFVLTRWPDNNDSDTITKPYFIETTYQGHVIEGSYTSFNGKYSSSIHNGEGVRSVFSSNNILLSEETFNEGVMVKYTTFYPNRDPESITHYQNGQPHGLRLTYLQGGIPNTIEEWRYGFQDGTTIVFKNGCKTSEIAYVKGVKEGLELRYNEQEIVAEEVSWRNDFLHGERKIYAGGIQKHEWYYRGRSVSKAKFERLNAAG

SEQ ID NO: 132 - DNA, 972 bp, Chlamydia pneumoniae
atgaaacaattacttttctgtgtttgcgtatttgctatgtcatgttctgcttacgcatccccacgacgacaagatccttctgttatgaaggaaacattccgaaataattatggcattattgtttccggtcaagaatgggtaaagcgtggttctgacggcaccatcaccaaagtactcaaaaatggagctaccctgcatgaagtttattctggaggcctccttcatggggaaattaccttaacgtttccccataccacagcattggacgttgttcaaatctatgatcaaggtagactcgtttctcgcaaaaccttttttgtgaacggtcttccatctcaagaagagctgttcaatgaagatggcacgtttgtcctcacacgatggccggacaacaacgacagtgataccatcacaaagccttacttcatagaaacgacatatcaagggcatgtcatagaaggaagttatacttcctttaatgggaaatactcctcatccatccacaatggagagggagttcgttctgtgttctcctccaataacatccttctttctgaagagaccttcaatgaaggtgtcatggtgaaatataccacattctatccgaatcgcgatcccgaatcgattactcattatcaaaatggacagcctcacggcttacggctaacatatctacaaggtggcatccccaatacgatagaggagtggcgttatggctttcaagacggaacgaccatcgtatttaaaaatggttgtaagacatctgagatcgcttatgttaagggagtgaaagaaggtttagaactgcgctacaatgaacaggaaattgtagctgaagaagtttcttggcgtaatgattttctgcatggagaacgtaagatctatgctggaggaatccaaaagcatgaatggtattaccgcgggagatctgtatctaaagccaaattcgagcggctaaatgctgcaggatag

SEQ ID NO: 133 - protein, 494 aa, Chlamydia pneumoniae
MKTSVSMLLALLCSGASSIVLHAATTPLNPEDGFIGEGNTNTFSPKSTTDAAGTTYSLTGEVLYIDPGKGGSITGTCFVETAGDLTFLGNGNTLKFLSVDAGANIAVAHVQGSKNLSFTDFLSLVITESPKSAVTTGKGSLVSLGAVQLQDINTLVLTSNASVEDGGVIKGNSCLIQGIKNSAIFGQNTSSKKGGAISTTQGLTIENNLGTLKFNENKAVTSGGALDLGAASTFTANHELIFSQNKTSGNAANGGAINCSGDLTFTDNTSLLLQENSTMQDGGALCSTGTISITGSDSINVIGNTSGQKGGAISAASLKILGGQGGALFSNNVVTHATPLGGAIFINTGGSLQLFTQGGDIVFEGNQVTTTAPNATTKRNVIHLESTAKWTGLAASQGNAIYFYDPITTNDTGASDNLRINEVSANQKLSGSIVFSGERLSTAEAIAENLTSRINQPVTLVEGSLVLKQGVTLITQGFSQEPESTLLLDLGTSL

SEQ ID NO: 134 - DNA, 1485 bp, Chlamydia pneumoniae
atgaagacttcagtttctatgttgttggccctgctttgctcgggggctagctctattgtactccatgccgcaaccactccactaaatcctgaagatgggtttattggggagggcaatacaaatactttttctccgaaatctacaacggatgctgcaggaactacctactctctcacaggagaggttctgtatatagatccggggaaaggtggttcaattacaggaacttgctttgtagaaactgctggcgatcttacatttttaggtaatggaaataccctaaagttcctgtcggtagatgcaggtgctaatatcgcggttgctcatgtacaaggaagtaagaatttaagcttcacagatttcctttctctggtgatcacagaatctccaaaatccgctgttactacaggaaaaggtagcctagtcagtttaggtgcagtccaactgcaagatataaacactctagttcttacaagcaatgcctctgtcgaagatggtggcgtgattaaaggaaactcctgcttgattcagggaatcaaaaatagtgcgatttttggacaaaatacatcttcgaaaaaaggaggggcgatctccacgactcaaggacttaccatagagaataacttagggacgctaaagttcaatgaaaacaaagcagtgacctcaggaggcgccttagatttaggagccgcgtctacattcactgcgaaccatgagttgatattttcacaaaataagacttctgggaatgctgcaaatggcggagccataaattgctcaggggaccttacatttactgataacacttctttgttacttcaagaaaatagcacaatgcaggatggtggagctttgtgtagcacaggaaccataagcattaccggtagtgattctatcaatgtgataggaaatacttcaggacaaaaaggaggagcgatttctgcagcttctctcaagattttgggagggcagggaggcgctctcttttctaataacgtagtgactcatgccacccctctaggaggtgccatttttatcaacacaggaggatccttgcagctcttcactcaaggaggggatatcgtattcgaggggaatcaggtcactacaacagctccaaatgctaccactaagagaaatgtaattcacctcgagagcaccgcgaagtggacgggacttgctgcaagtcaaggtaacgctatctatttctatgatcccattaccaccaacgatacgggagcaagcgataacttacgtatcaatgaggtcagtgcaaatcaaaagctctcgggatctatagtattttctggagagagattgtcgacagcagaagctatagctgaaaatcttacttcgaggatcaaccagcctgtcactttagtagaggggagcttagtacttaaacagggagtgaccttgatcacacaaggattctcgcaggagccagaatccacgcttcttttggatctggggacctcattataa

SEQ ID NO: 135 - protein, 964 aa, Chlamydia pneumoniae
MRKLRILAIVLIALSIILIAGGVVLLTVAIPGLSSVISSPAGMGACALGCVMLALGIDVLLKKREVPIVLASVTTTPGTGSPRSGISISGADSTIRSLPTYLLDEGHPQSMRKLRILAIVLIVFSIILIASGVVLLTVAIPGLSSVISSPAGMGACALGCVMLALGIDVLLKKREVPIVLASVTTTPGTGSPRSGISISGADSTIRSLPTYPLDEGHPQSMRKLRILAIVLIVFSIILIASGVVLLTVAIPGLSSIISSPAEMGACALGCVMLALGIDVLLKKREVPIVVPAPIPEEVVIDDIDEESIRLQQEAEAALARLPEEMSAFEGYIKVVESHLENMKSLPYDGHGLEEKTKHQIRVVRSSLKAMVPEFLDIRRIFEEEEFFFLSARKRLIDLATTLVERKILTEQLERNNLRKAFSYLYQDSIFKKIIDNFEKLAWKFMILSKSICRFTIIFENHEHGVAKSLLHKNAVLLEKVIYRSLQKSYRDIGMSSAKMKILHGNPFFSLEDNKKTIMKEHAEMLESLSSYRKVFLALSDENVVDTPSDPKKWDLSGIPCRDALSEISRDEQWQKKAHLKHQESLYTQARDRLTDQSSKENQKELEKAEQEYISSWERVKKFEIERVQERIRAIQKLYPNILEREEETTGQETVTPTVQGTTASSDLTDILGRIEVSSREDNQNQESCVKVLRSHEVEMSWEVKQEYGPKKKEFQDQMGSLERFFTEHIEELEVLQKDYSKHLSYFKKVNNKKEVQYAKFRLKVLESDLEGILAQTESAESLLTQEELPILATRGALEKAVFKGSLCCALASKAKPYFEEDPRFQDSDTQLRALTLRLQEAKASLEEEIKRFSNLENDIAEERRLLKESKQTFERAGLGVLREIAVESTYDLRSLTNTWEGTPESEKVYFSMYLNYYNEEKRRAKTRLVEMTQRYRDFKMALEAMQFNEEALLQEELSIQAPSE

SEQ ID NO: 136 - DNA, 2895 bp, Chlamydia pneumoniae
atgaggaaacttcgtattcttgcgatcgttctcatagctttgagcattattttgattgcaggtggtgtggtattgcttactgtagcgatccctggattaagttcagtcatttcttccccggcagggatgggtgcctgtgctttgggatgtgtgatgcttgctttagggatcgatgttcttctgaagaaacgagaagtccctatagttctcgcatctgtaactacgacaccaggaactggcagccctagaagtggtatttctatttcaggagctgatagcaccatacgttctcttcctacgtatctcttggacgagggacatccacaatccatgaggaaacttcgtattcttgcgatcgttctcatagtttttagcattattttgattgcaagtggtgtggtattgcttactgtagcgatccctggattaagttcagtcatttcttccccggcagggatgggtgcctgtgctttgggatgtgtgatgcttgctttagggatcgatgttcttctgaagaaacgagaagtccctatagttctcgcatctgtaactacgacaccaggaactggcagccctagaagtggtatttctatttcaggagctgatagcaccatacgttctcttcctacgtatcccttggacgagggacatccacaatccatgaggaaacttcgtattcttgcgatcgttctcatagtttttagcattattttgattgcaagtggtgtggtattgcttactgtagcgatccctggattaagctcgatcatttcttccccagcggagatgggtgcttgtgctttgggatgtgtgatgcttgctttggggatcgacgttcttctgaagaaacgagaagtccctatagtagttcccgcacctattcctgaagaagtcgtcatagatgatatagatgaagagagtatacggctgcagcaggaagctgaagccgctttagcaagacttcctgaggagatgagtgcatttgaaggttacataaaagttgtcgagagtcatttggagaacatgaaaagcctgccttatgatggtcatgggctagaagagaaaacgaaacatcagataagagtcgtcagatcttctttgaaggctatggttccagaatttttagatatcagaagaatttttgaagaagaagagttcttttttctctcagctcgcaaacgacttatagatttagctactactttagtagagagaaaaattttaacagagcaacttgagcgcaataatttaaggaaagcgttttcttatttatatcaggactcaatttttaaaaaaattattgataacttcgagaagttagcatggaaatttatgattttgagtaaatcaatttgtcgatttacaattatttttgaaaatcatgaacatggtgtagcaaagagcctgttacacaagaatgcagtgttactggagaaggtaatctataggagtttgcaaaaaagctatagagatataggcatgtcatctgcaaagatgaaaatcttgcacggcaacccttttttctctttggaagataataaaaagacgataatgaaagaacacgcagagatgcttgaaagtctcagtagctataggaaggtatttttagctctatctgatgagaacgttgtagatacacctagcgatccaaagaaatgggatttgtcaggaatcccctgtagggacgcgttgtctgagatttctcgtgatgaacagtggcagaagaaagcacatctaaagcatcaagagtccctctatacgcaagctagggatcgtttaacagaccagagctctaaagaaaatcagaaagagttagagaaagctgaacaagagtacatatcttcttgggaacgggttaaaaaatttgagattgagagagtacaggagaggatacgggcaattcaaaagctttatcctaatatcctcgagagagaagaagaaaccacaggtcaggagactgtgactccaactgttcaagggacgacggcttcatccgatttaacagatattttaggaagaatagaggtctccagtagggaggataatcagaatcaagagtcttgtgtaaaagtcttaagaagtcatgaggtagaaatgagctgggaagtcaaacaagagtatggccctaagaaaaaagaatttcaggatcaaatgggttctttagagaggttttttacagagcatattgaagagttagaagtattacagaaggactactctaaacacttgtcttattttaaaaaagtaaacaataagaaagaggttcaatatgcgaagtttaggttgaaggttttagagtcagatttagaagggattctagctcagactgagagtgctgagagtctgttaactcaagaagaacttccgattcttgcaactcggggagccttagagaaagctgttttcaaagggagtctatgttgcgcgctagcaagcaaagcaaaaccctattttgaagaggatcccagattccaagattctgatacgcaattgcgagctctgactctaaggttacaggaggctaaggcaagcctggaagaagagataaagagattttcaaatcttgagaacgatattgcagaggaaagacgccttcttaaagagagcaagcagacgttcgaaagagcaggtttaggggttctccgagaaattgcagtcgagtctacttatgatttgcgttccttaacaaatacatgggaagggaccccagagagtgagaaggtctattttagcatgtatcttaattattacaacgaagagaaacgtagggctaaaacaagattggttgaaatgacacagaggtatagagattttaaaatggccttggaagctatgcagtttaatgaagaagcccttttgcaagaggaactctctattcaagctcccagtgaataa

SEQ ID NO: 137 - protein, 523 aa, Chlamydia pneumoniae
MYQENLRLLERLLYNSVQKSYADRLFSYEKTKMVHDTPLIPWEEDKEKCAEAEKAFLEQQKILLDYGKSIFWLNENDEINLNDPWSWGLNTVRTRKVFQEVDDSERWNHKVLIQKLEDDYEKLLEESSKESTEANKKLLSDLVDRLEDAKTKFFLKKQEEVETRVKDLRARYGGTVDPKQDTEAKKKVELEASLETFLDSIESELVQCLEDQDIYWKEQDVKDLARTQELEEQDIEAKREEAAEDLRSLNERLKKSKTMLDRAKWHIENAEDSITWWTSQIEMKDMKARLKILKEDITSVLPEIDEIETCLSLEELPLLTTRELLTKSYLKFKICSETLLKMTSVFENNIYVQEYEVQLQNLGFKLQGISQRFGKKQDDFANLEEQVALQKKRLRELTQNFEIQGFNFMKEDFKAAAKDLYIRSTAEQKMNFDVPCMELFRRYHEEVNKPLLELMYNCADSYRDAKKKLCSLRLDEKELLQKEIKKEEFYQKKQQRHADRSRHTTYQKLRIAEELALELKKKI

SEQ ID NO: 138 - DNA, 1572 bp, Chlamydia pneumoniae
atgtaccaggagaatctaagattgttggaaaggcttctttataatagtgttcaaaagagctatgcggatcggctgttttcctatgaaaagacaaagatggtgcacgatactccgctgattccttgggaagaggataaggaaaaatgtgctgaagctgagaaagctttcttagagcaacagaagattctcctagattatggaaaatctatcttttggctgaatgagaacgatgagatcaatttaaacgatccttggagttggggtcttaatacggtgaggactaggaaagtattccaagaggttgacgacagtgaacgttggaatcataaggtactcattcaaaaactcgaggacgattatgagaaacttctagaggaaagttcaaaagagtctactgaagcaaataagaagcttttatctgacttagtagatcgtcttgaagatgctaagacaaaatttttcctgaagaaacaggaggaggtggagactcgcgttaaggatcttagagctcgatatggaggcacagtagatcctaagcaggatacggaagctaagaagaaagtcgaattggaggctagcttagaaacctttttagattccatcgaatcagagctagtacagtgtttagaagatcaagatatatattggaaagaacaggatgtcaaagatctagcacgtacgcaagagctcgaggaacaagatattgaagcgaagagggaagaagctgccgaagacctaagaagtcttaatgagcgtttaaagaagtcaaaaactatgttagatagggctaaatggcatattgaaaatgctgaggacagtattacctggtggactagtcagatagaaatgaaggatatgaaagcaagactgaagatcttaaaagaagatataacaagtgttctacctgaaatagatgagattgaaacgtgtttaagcttagaggagcttcctttgcttacgaccagggaactcttaactaagtcctacctaaagtttaagatttgttcggaaacactattaaaaatgacttctgtgtttgagaacaatatctatgttcaggagtacgaggttcagctgcaaaatctagggtttaagttacaaggtatatctcagagattcggaaagaaacaagacgattttgcgaatctagaggaacaggttgctttgcaaaagaaacgactcagagagctcactcagaattttgaaatacaaggattcaatttcatgaaagaagattttaaggcagccgctaaagatctttatataagaagtacagctgaacaaaagatgaactttgatgtgccttgcatggagctcttccgtaggtatcatgaggaggtcaacaagccgcttcttgagttgatgtacaattgtgcagacagttatagagatgctaagaaaaagctttgctctctacgtcttgatgaaaaagagttattacaaaaagaaatcaagaaagaggaattttatcaaaagaaacaacaaaggcatgcagatagatcacgtcatactacgtatcaaaagctacgaattgctgaagagcttgctcttgagctgaagaagaaaatctaa

SEQ ID NO: 139 - protein, 841 aa, Chlamydia pneumoniae
MKIPLRFLLISLVPTLSMSNLLGAATTEELSASNSFDGTTSTTSFSSKTSSATDGTNYVFKDSVVIENVPKTGETQSTSCFKNDAAAGDLNFLGGGFSFTFSNIDATTASGAAIGSEAANKTVTLSGFSALSFLKSPASTVTNGLGAINVKGNLSLLDNDKVLIQDNFSTGDGGAINCAGSLKIANNKSLSFIGNSSSTRGGAIHTKNLTLSSGGETLFQGNTAPTAAGKGGAIAIADSGTLSISGDSGDIIFEGNTIGATGTVSHSAIDLGTSAKITALRAAQGHTIYFYDPITVTGSTSVADALNINSPDTGDNKEYTGTIVFSGEKLTEAEAKDEKNRTSKLLQNVAFKNGTVVLKGDVVLSANGFSQDANSKLIMDLGTSLVANTESIELTNLEINIDSLRNGKKIKLSAATAQKDIRIDRPVVLAISDESFYQNGFLNEDHSYDGILELDAGKDIVISADSRSIDAVQSPYGYQGKWTINWSTDDKKATVSWAKQSFNPTAEQEAPLVPNLLWGSFIDVRSFQNFIELGTEGAPYEKRFWVAGISNVLHRSGRENQRKFRHVSGGAVVGASTRMPGGDTLSLGFAQLFARDKDYFMNTNFAKTYAGSLRLQHDASLYSVVSILLGEGGLREILLPYVSKTLPCSFYGQLSYGHTDHRMKTESLPPPPPTLSTDHTSWGGYVWAGELGTRVAVENTSGRGFFQEYTPFVKVQAVYARQDSFVELGAISRDFSDSHLYNLAIPLGIKLEKRFAEQYYHVVAMYSPDVCRSNPKCTTTLLSNQGSWKTKGSNLARQAGIVQASGFRSLGAAAELFGNFGFEWRGSSRSYNVDAGSKIKF

SEQ ID NO: 140 - DNA, 2526 bp, Chlamydia pneumoniae
atgaagattccactccgctttttattgatatcattagtacctacgctttctatgtcgaatttattaggagctgctactaccgaagagttatcggctagcaatagcttcgatggaactacatcaacaacaagcttttctagtaaaacatcatcggctacagatggcaccaattatgtttttaaagattctgtagttatagaaaatgtacccaaaacaggggaaactcagtctactagttgttttaaaaatgacgctgcagctggagatctaaatttcttaggagggggattttctttcacatttagcaatatcgatgcaaccacggcttctggagctgctattggaagtgaagcagctaataagacagtcacgttatcaggattttcggcactttcttttcttaaatccccagcaagtacagtgactaatggattgggagctatcaatgttaaagggaatttaagcctattggataatgataaggtattgattcaggacaatttctcaacaggagatggcggagcaattaattgtgcaggctccttgaagatcgcaaacaataagtccctttcttttattggaaatagttcttcaacacgtggcggagcgattcataccaaaaacctcacactatcttctggtggggaaactctatttcaggggaatacagcgcctacggctgctggtaaaggaggtgctatcgcgattgcagactctggcaccctatccatttctggagacagtggcgacattatctttgaaggcaatacgataggagctacaggaaccgtctctcatagtgctattgatttaggaactagcgctaagataactgcgttacgtgctgcgcaaggacatacgatatacttttatgatccgattactgtaacaggatcgacatctgttgctgatgctctcaatattaatagccctgatactggagataacaaagagtatacgggaaccatagtcttttctggagagaagctcacggaggcagaagctaaagatgagaagaaccgcacttctaaattacttcaaaatgttgcttttaaaaatgggactgtagttttaaaaggtgatgtcgttttaagtgcgaacggtttctctcaggatgcaaactctaagttgattatggatttagggacgtcgttggttgcaaacaccgaaagtatcgagttaacgaatttggaaattaatatagactctctcaggaacgggaaaaagataaaactcagtgctgccacagctcagaaagatattcgtatagatcgtcctgttgtactggcaattagcgatgagagtttttatcaaaatggctttttgaatgaggaccattcctatgatgggattcttgagttagatgctgggaaagacatcgtgatttctgcagattctcgcagtatagatgctgtacaatctccgtatggctatcagggaaagtggacgatcaattggtctactgatgataagaaagctacggtttcttgggcgaagcagagttttaatcccactgctgagcaggaggctccgttagttcctaatcttctttggggttcttttatagatgttcgttccttccagaattttatagagctaggtactgaaggtgctccttacgaaaagagattttgggttgcaggcatttccaatgttttgcataggagcggtcgtgaaaatcaaaggaaattccgtcatgtgagtggaggtgctgtagtaggtgctagcacgaggatgccgggtggtgataccttgtctctgggttttgctcagctctttgcgcgtgacaaagactactttatgaataccaatttcgcaaagacctacgcaggatctttacgtttgcagcacgatgcttccctatactctgtggtgagtatccttttaggagagggaggactccgcgagatcctgttgccttatgtttccaagactctgccgtgctctttctatgggcagcttagctacggccatacggatcatcgcatgaagaccgagtctctaccccccccccccccgacgctctcgacggatcatacttcttggggaggatatgtctgggctggagagctgggaactcgagttgctgttgaaaataccagcggcagaggatttttccaagagtacactccatttgtaaaagtccaagctgtttacgctcgccaagatagctttgtagaactaggagctatcagtcgtgattttagtgattcgcatctttataaccttgcgattcctcttggaatcaagttagagaaacggtttgcagagcaatattatcatgttgtagcgatgtattctccagatgtttgtcgtagtaaccccaaatgtacgactaccctactttccaaccaagggagttggaagaccaaaggttcgaacttagcaagacaggctggtattgttcaggcctcaggttttcgatctttgggagctgcagcagagcttttcgggaactttggctttgaatggcggggatcttctcgtagctataatgtagatgcgggtagcaaaatcaaattttag

SEQ ID NO: 141 - protein, 251 aa, Chlamydia pneumoniae
MNVADLLSHLETLLSSKIFQDYGPNGLQVGDPQTPVKKIAVAVTADLETIKQAVAAEANVLIVHHGIFWKGMPYPITGMIHKRIQLLIEHNIQLIAYHLPLDAHPTLGNNWRVALDLNWHDLKPFGSSLPYLGVQGSFSPIDIDSFIDLLSQYYQAPLKGSALGGPSRVSSAALISGGAYRELSSAATSQVDCFITGNFDEPAWSTALESNINFLAFGHTATEKVGPKSLAEHLKSEFPISTTFIDTANPF

SEQ ID NO: 142 - DNA, 756 bp, Chlamydia pneumoniae
atgaatgttgcggatctcctttctcatcttgagactcttctctcatcaaaaatatttcaggattatggacccaacggacttcaagttggagatccccaaactccggtaaagaaaatcgctgttgcagttaccgcagatctagaaaccataaaacaagctgttgcggccgaagcaaacgttctcattgtacaccacggaattttttggaaaggtatgccctatcctattaccggcatgatccataagcgcatccaattactaatagaacacaatatccaactcattgcctaccaccttcctttggatgctcaccctaccttaggaaataactggagagttgccctggatctaaattggcatgacttgaagccctttggttcttccctcccttatttaggagtgcaaggctctttctctcctatcgatatagattctttcattgacctgttatctcaatattaccaagctcccctaaaaggatctgccttgggcggcccctctagagtctcctcagcagctctgatctcaggaggagcttatagagaactctcttcggcagccacgtcccaagtcgattgcttcatcacaggaaattttgatgaacctgcatggtcgacagctctagaaagcaatatcaacttcctagcatttggacatacagccacagaaaaagtaggtccaaaatctcttgcagagcatctaaaaagcgaatttcctatttccacaacctttatagatacggccaaccccttctaa

SEQ ID NO: 143 - protein, 285 aa, Chlamydia pneumoniae
MKHYLSFSPSADFFSKQGAIETQVLFGERVLVKGSTCYAYSQLFHNELLWKPYPGHSFRSTLVPCTPEFHIHPNVSVVSVDAFLDPWGIPLPFGTLLHVNSQNTVIFPKDILNHMNTIWGSGTPQCDPRHLRRLNYNFFAELLIKDADLLLNFPYVWGGRSVHESLEKPGVDCSGFINILYQAQGYNVPRNAADQYADCHWISSFENLPSGGLIFLYPKEEKRISHVMLKQDSSTLIHASGGGKKVEYFILEQDGKFLDSTYLFFRNNQRGRAFFGIPRKRKAFL

SEQ ID NO: 144 - DNA, 858 bp, Chlamydia pneumoniae
atgaaacactacctatcattttctccttctgctgattttttctctaaacagggtgctattgaaactcaagtcctttttggagagcgcgtcttagtcaaagggagcacctgctatgcatattcccaattattccacaatgagctgttatggaagccctatccaggtcatagctttcgttctaccctagtcccctgcactcctgaatttcatatccatccaaatgtttctgtggtttctgtggatgcatttttagatccttgggggatccctcttccttttggaactttactccatgtgaattctcaaaataccgttattttccctaaggatattctcaatcatatgaacaccatctggggctccggcacacctcaatgcgatcctagacatctacgtcgtctaaattataacttctttgctgaacttttaattaaagacgcagaccttttactgaactttccctatgtatggggaggacggtctgtacacgaaagtctggaaaagccgggtgttgattgttcgggatttatcaatatcctttaccaggcacagggatacaacgtccctagaaacgctgcagatcaatatgcggattgtcattggatctctagctttgagaaccttccttctggtgggttaatatttctttaccctaaagaagaaaagcgtatttctcatgttatgttgaaacaggatagttccaccctcattcatgcttctggtggagggaaaaaagtggagtatttcattttagaacaagatgggaagtttttagattcgacttatctattttttagaaataatcagaggggacgggcattttttgggatccctagaaaaagaaaagcctttctgtaa

SEQ ID NO: 145 - protein, 203 aa, Chlamydia pneumoniae
MTSPIPFQSSGDASFLAEQPQQLPSTSESQLVTQLLTMMKHTQALSETVLQQQRDRLPTASIILQVGGAPTGGAGAPFQPGPADDHHHPIPPPVVPAQIETEITTIRSELQLMRSTLQQSTKGARTGVLVVTAILMTISLLAIIIIILAVLGFTGVLPQVALLMQGETNLIWAMVSGSIICFIALIGTLGLILTNKNTPLPAS

SEQ ID NO: 146 - DNA, 612 bp, Chlamydia pneumoniae
atgacctcaccgatcccctttcagtctagtggcgatgcctctttccttgccgagcagccacagcaactcccgtctacttctgaatctcagctagtaactcaattgctaaccatgatgaagcatactcaagcattatccgaaacggttcttcaacaacaacgcgatcgattaccaaccgcatctattatccttcaagtaggaggagctcctacaggaggagcgggtgcgccttttcaaccaggaccggcagatgatcatcatcatcccataccgccgcctgttgtaccagctcaaatagaaacagaaatcaccactataagatccgagttacagctcatgcgatctactctacaacaaagcacaaaaggagctcgtacaggagttctagtggttactgcaatcttaatgacgatctccttattggctattattatcataatactagctgtgcttggatttacgggcgtcttgcctcaagtagctttattgatgcagggtgaaacaaatctgatttgggctatggtgagcggttctattatttgctttattgcgctaattggaactctaggattaattttaacaaataagaacacgcctctaccggcttcttaa

SEQ ID NO: 147 - protein, 790 aa, Chlamydia pneumoniae
MLIMRNKVILQISILALIQTPLTLFSTEKVKEGHVVVDSITIITEGENASNKHPLPKLKTRSGALFSQLDFDEDLRILAKEYDSVEPKVEFSEGKTNIALHLIAKPSIRNIHISGNQVVPEHKILKTLQIYRNDLFEREKFLKGLDDLRTYYLKRGYFASSVDYSLEHNQEKGHIDVLIKINEGPCGKIKQLTFSGISRSEKSDIQEFIQTKQHSTTTSWFTGAGLYHPDIVEQDSLAITNYLHNNGYADAIVNSHYDLDDKGNILLYMDIDRGSRYTLGHVHIQGFEVLPKRLIEKQSQVGPNDLYCPDKIWDGAHKIKQTYAKYGYINTNVDVLFIPHATRPIYDVTYEVSEGSPYKVGLIKITGNTHTKSDVILHETSLFPGDTFNRLKLEDTEQRLRNTGYFQSVSVYTVRSQLDPMGNADQYRDIFVEVKETTTGNLGLFLGFSSLDNLFGGIELSESNFDLFGARNIFSKGFRCLRGGGEHLFLKANFGDKVTDYTLKWTKPHFLNTPWILGIELDKSINRALSKDYAVQTYGGNVSTTYILNEHLKYGLFYRGSQTSLHEKRKFLLGPNIDSNKGFVSAAGVNLNYDSVDSPRTPTTGIRGGVTFEVSGLGGTYHFTKLSLNSSIYRKLTRKGILKIKGEAQFIKPYSNTTAEGVPVSERFFLGGETTVRGYKSFIIGPKYSATEPQGGLSSLLISEEFQYPLIRQPNISAFVFLDSGFVGLQEYKISLKDLRSSAGFGLRFDVMNNVPVMLGFGWPFRPTETLNGEKIDVSQRFFFALGGMF

SEQ ID NO: 148 - DNA, 2373 bp, Chlamydia pneumoniae
atgctcatcatgcgaaataaagttatcttgcaaatatctattctagcgttaatccaaacccctttaactttattttctactgaaaaagttaaagaaggccatgtggtggtagactctatcacaatcataacggaaggagaaaatgcttcaaataaacatcccttacccaaattaaagaccagaagtggggctcttttttctcaattagattttgatgaagacttgagaattctagctaaagaatacgactctgttgagcctaaagtagaattttctgaagggaaaactaacatagcccttcacctaatagctaaaccctcaattcgaaatattcatatctcaggaaatcaagtcgttcctgaacataaaattcttaaaaccctacaaatttaccgtaatgatctctttgaacgagaaaaatttcttaagggtcttgatgatctaagaacgtattatctcaagcgaggatatttcgcatccagtgtagactacagtctggaacacaatcaagaaaaaggtcacatcgatgttttaattaaaatcaatgaaggtccttgcgggaaaattaaacagcttacgttctcaggaatctctcgatcagaaaaatcagatatccaagaatttattcaaaccaagcagcactctacaactacaagttggtttactggagctggactctatcacccagatattgttgaacaagatagcttggcaattacgaattacctacataataacgggtacgctgatgctatagtcaactctcactatgaccttgacgacaaagggaatattcttctttacatggatattgatcgagggtcgcgatataccttaggacacgtccatatccaagggtttgaggttttgccaaaacgccttatagaaaagcaatcccaagtcggccccaatgatctttattgccccgataaaatatgggatggggctcataagatcaaacaaacttatgcaaagtatggctacatcaataccaatgtagacgttctcttcatccctcacgcaacccgccctatttatgatgtaacttatgaggtaagtgaagggtctccttataaagttgggttaattaaaattactgggaatacccatacaaaatctgacgttattttacacgaaaccagtctcttcccaggagatacattcaatcgcttaaagctagaagatactgagcaacgtttaagaaatacaggctacttccaaagcgttagtgtctatacagttcgttctcaacttgatcctatgggcaatgcggatcaataccgagatatttttgtagaagtcaaagaaacaacaacaggaaacttaggcttattcttaggatttagttctcttgacaatctttttggaggaattgaactatctgaaagtaattttgatctatttggagctagaaatatattttctaaaggttttcgttgtctaagaggcggtggagaacatctattcttaaaagccaacttcggggacaaagtcacagactatactttgaagtggaccaaacctcattttctaaacactccttggattttaggaattgaattagataaatcaattaacagagcattatctaaagattatgctgtccaaacctatggcgggaacgtcagcacaacgtatatcttgaacgaacacctgaaatacggtctattttatcgaggaagtcaaacgagtttacatgaaaaacgtaagttcctcctagggccaaatatagacagcaataaaggatttgtctctgctgcaggtgtcaacttgaattacgattctgtagatagtcctagaactccaactacagggattcgcgggggggtgacttttgaggtttctggtttgggaggaacttatcattttacaaaactctctttaaacagctctatctatagaaaacttacgcgtaaaggtattttgaaaatcaaaggggaagctcaatttattaaaccctatagcaatactacagctgaaggagttcctgtcagtgagcgcttcttcctaggtggagagactacagttcggggatataaatcctttattatcggtccaaaatactctgctacagaacctcagggaggactctcttcgctccttatttcagaagagtttcaataccctctcatcagacaacctaatattagtgcctttgtattcttagactcaggttttgtcggtttacaagagtataagatttcgttaaaagatctacgtagtagtgctggatttggtctgcgcttcgatgtaatgaataatgttcctgttatgttaggatttggttggcccttccgtccaaccgagactttgaatggagaaaaaattgatgtatctcagcgattcttctttgctttagggggcatgttctaa

SEQ ID NO: 149 - protein, 353 aa, Chlamydia pneumoniae
MNKRQKDKLKICVIISTLILVGIFARAPRGDTFKTFLKSEEAIIYSNQCNEDMRKILCDAIEHADEEIFLRIYNLSEPKIQQSLTRQAQAKNKVTIYYQKFKIPQILKQASNVTLVEQPPAGRKLMHQKALSIDKKDAWLGSANYTNLSLRLDNNLILGMHSSELCDLIITNTSGDFSIKDQTGKYFVLPQDRKIAIQAVLEKIQTAQKTIQVAMFALTHSEIIQALHQAKQRGIHVDIIIDRSHSKLTFKQLRQLNINKDFVSINTAPCTLHHKFAVIDNKTLLAGSINWSKGRFSLNDESLIILENLTKQQNQKLRMIWKDLAKHSEHPTVDDEEKEIIEKSLPVEEQEAA

SEQ ID NO: 150 - DNA, 1062 bp, Chlamydia pneumoniae
atgaataaaagacaaaaagataaattaaaaatctgtgttattattagcacgttgattttagtaggaatttttgcaagagctcctcgtggtgacacttttaagacttttttaaagtctgaagaagctatcatctactcaaatcaatgcaatgaggacatgcgtaaaattctatgcgatgctatagaacacgctgatgaagagatcttcctacgtatttataacctctcagaacccaagatccaacagagtttaactcgacaagctcaagcaaaaaacaaagttacgatctactatcaaaaatttaaaattccccaaatcttaaagcaagccagcaatgtaactttagtcgagcaacctccagcagggcgtaaactgatgcatcaaaaagctctttccatagataagaaagatgcttggctaggatctgcgaactacaccaatctttctctacgtttagataataatctcattctaggaatgcatagctcggagctctgtgatctcattatcacaaatacctctggagacttttctataaaggatcaaacaggaaagtattttgttcttcctcaagatcgtaaaattgcaatacaagctgtactcgaaaaaatccagacagctcagaaaaccatccaagttgctatgtttgctctgacccactcggagattattcaagccttacatcaagcaaaacaacgaggaatccatgtagatattatcattgatagaagtcatagcaaacttacttttaagcaattacgacaattaaatatcaataaagactttgtttctataaataccgcaccctgtactcttcaccataagtttgcagttatagataataaaactctacttgcaggatctataaattggtctaaaggaagattctccttaaatgatgaaagcttgatcatactggaaaacctgaccaaacaacaaaatcagaaacttcgaatgatttggaaagatctagctaagcattcagaacatcctacagtagacgatgaagaaaaagaaattatagaaaaaagtcttccagtagaagagcaagaagcagcgtga

SEQ ID NO: 151 - protein, 327 aa, Chlamydia pneumoniae
MDAKMGYIFKVMRWIFCFVACGITFGCTNSGFQNANSRPCILSMNRMIHDCVERVVGNRLATAVLIKGSLDPHAYEMVKGDKDKIAGSAVIFCNGLGLEHTLSLRKHLENNPNSVKLGERLIARGAFVPLEEDGICDPHIWMDLSIWKEAVIEITEVLIEKFPEWSAEFKANSEELVCEMSILDSWAKQCLSTIPENLRYLVSGHNAFSYFTRRYLATPEEVASGAWRSRCISPEGLSPEAQISVRDIMAVVDYINEHDVSVVFPEDTLNQDALKKIVSSLKKSHLVRLAQKPLYSDNVDDNYFSTFKHNVCLITEELGGVALECQR

SEQ ID NO: 152 - DNA, 984 bp, Chlamydia pneumoniae
atggatgcgaaaatgggatatatatttaaagtgatgcgttggattttctgtttcgtggcatgtggtataacttttggatgtaccaattctgggtttcagaatgcaaattcacgtccttgtatactatccatgaatcgcatgattcatgattgtgttgaaagagtcgtggggaataggcttgctaccgctgttttgatcaaaggatccttagaccctcatgcgtatgagatggttaaaggggataaggacaagattgctggaagtgccgtaattttttgtaacggcctgggtcttgagcatacattaagtttgcggaagcatttagaaaataatcccaatagtgtcaagttaggggagcggttgatagcgcgtggggcctttgttcctctagaagaagacggtatttgcgatcctcatatctggatggatctttctatttggaaggaagctgtcatagaaattacagaagttctcattgaaaagttccctgaatggtctgctgaatttaaagcaaatagtgaggaacttgtttgtgaaatgtctattttagattcttgggcgaaacaatgcttgagcacaattcctgaaaatttacggtatcttgtctcaggtcataatgcgttcagttactttacacgtcgctatttagctactcctgaagaagtggcttccggagcatggaggtctcgttgtatttctcctgagggtctatctccagaagctcaaatcagtgttcgtgatattatggcggttgtagattatattaatgagcatgatgtcagtgtggttttccctgaggatactctgaaccaagatgcgttgaaaaaaattgtttcttctctgaagaaaagtcatttagttcgtctagctcaaaaaccattgtatagtgataatgtggacgacaattattttagcacctttaaacataatgtctgccttatcacagaagaattaggaggggtggctcttgaatgtcaaagatga

SEQ ID NO: 153 - protein, 936 aa, Chlamydia pneumoniae
MKSSVSWLFFSSIPLFSSLSIVAAEVTLDSSNNSYDGSNGTTFTVFSTTDAAAGTTYSLLSDVSFQNAGALGIPLASGCFLEAGGDLTFQGNQHALKFAFINAGSSAGTVASTSAADKNLLFNDFSRLSIISCPSLLLSPTGQCALKSVGNLSLTGNSQIIFTQNFSSDNGGVINTKNFLLSGTSQFASFSRNQAFTGKQGGVVYATGTITIENSPGIVSFSQNLAKGSGGALYSTDNCSITDNFQVIFDGNSAWEAAQAQGGAICCTTTDKTVTLTGNKNLSFTNNTALTYGGAISGLKVSISAGGPTLFQSNISGSSAGQGGGGAINIASAGELALSATSGDITFNNNQVTNGSTSTRNAINIIDTAKVTSIRAATGQSIYFYDPITNPGTAASTDTLNLNLADANSEIEYGGAIVFSGEKLSPTEKAIAANVTSTIRQPAVLARGDLVLRDGVTVTFKDLTQSPGSRILMDGGTTLSAKEANLSLNGLAVNLSSLDGTNKAALKTEAADKNISLSGTIALIDTEGSFYENHNLKSASTYPLLELTTAGANGTITLGALSTLTLQEPETHYGYQGNWQLSWANATSSKIGSINWTRTGYIPSPERKSNLPLNSLWGNFIDIRSINQLIETKSSGEPFERELWLSGIANFFYRDSMPTRHGFRHISGGYALGITATTPAEDQLTFAFCQLFARDRNHITGKNHGDTYGASLYFHHTEGLFDIANFLWGKATRAPWVLSEISQIIPLSFDAKFSYLHTDNHMKTYYTDNSIIKGSWRNDAFCADLGASLPFVISVPYLLKEVEPFVKVQYIYAHQQDFYERHAEGRAFNKSELINVEIPIGVTFERDSKSEKGTYDLTLMYILDAYRRNPKCQTSLIASDANWMAYGTNLARQGFSVRAANHFQVNPHMEIFGQFAFEVRSSSRNYNTNLGSKFCF

SEQ ID NO: 154 - DNA, 2811 bp, Chlamydia pneumoniae
atgaagtcctctgtctcttggttgttcttttcttcaatcccgctcttttcatcgctctctatagtcgcggcagaggtgaccttagatagcagcaataatagctatgatggatctaacggaactaccttcacggtcttttccactacggacgctgctgcaggaactacctattccttactttccgacgtatcctttcaaaatgcaggggctttaggaattcccttagcctcaggatgcttcctagaagcgggcggcgatcttactttccaaggaaatcaacatgcactgaagtttgcatttatcaatgcgggctctagcgctggaactgtagccagtacctcagcagcagataagaatcttctctttaatgatttttctagactctctattatctcttgtccctctcttcttctctctcctactggacaatgtgctttaaaatctgtggggaatctatctctaactggcaattcccaaattatatttactcagaacttctcgtcagataacggcggtgttatcaatacgaaaaacttcttattatcagggacatctcagtttgcgagcttttcgagaaaccaagccttcacagggaagcaaggcggtgtagtttacgctacaggaactataactatcgagaacagccctgggatagtttccttctctcaaaacctagcgaaaggatctggcggtgctctgtacagcactgacaactgttcgattacagataactttcaagtgatctttgacggcaatagtgcttgggaagccgctcaagctcagggcggggctatttgttgcactacgacagataaaacagtgactcttactgggaacaaaaacctctctttcacaaataatacagcattgacatatggcggagccatctctggactcaaggtcagtatttccgctggaggtcctactctatttcaaagtaatatctcaggaagtagcgccggtcagggaggaggaggagcgatcaatatagcatctgctggggaactcgctctctctgctacttctggagatattaccttcaataacaaccaagtcaccaacggaagcacaagtacaagaaacgcaataaatatcattgataccgctaaagtcacatcgatacgagctgctacggggcaatctatctatttctatgatcccatcacaaatccaggaaccgcagcttctaccgacacattgaacttaaacttagcagatgcgaacagtgagatcgagtatgggggtgcgattgtcttttctggagaaaagctttcccctacagaaaaagcaatcgctgcaaacgtcacctctactatccgacaacctgcagtattagcgcggggagatcttgtacttcgtgatggagtcaccgtaactttcaaggatctgactcaaagtccaggatcccgcatcttaatggatggggggactacacttagtgctaaagaggcaaatctttcgcttaatggcttagcagtaaatctctcctctttagatggaaccaacaaggcagctttaaaaacagaagctgcagataaaaatatcagcctatcgggaacgattgcgcttattgacacggaagggtcattctatgagaatcataacttaaaaagtgctagtacctatcctcttcttgaacttaccaccgcaggagccaacggaacgattactctgggagctctttctaccctgactcttcaagaacctgaaacccactacgggtatcaaggaaactggcagttgtcttgggcaaatgcaacatcctcaaaaataggaagcatcaactggacccgtacaggatacattcctagtcctgagagaaaaagtaatctccctctaaatagcttatggggaaactttatagatatacgctcgatcaatcagcttatagaaaccaagtccagtggggagccttttgagcgtgagctatggctttcaggaattgcgaatttcttctatagagattctatgcccacccgccatggtttccgccatatcagcgggggttatgcactagggatcacagcaacaactcctgccgaggatcagcttacttttgccttctgccagctctttgctagagatcgcaatcatattacaggtaagaaccacggagatacttacggtgcctctttgtatttccaccatacagaagggctcttcgacatcgccaatttcctctggggaaaagcaacccgagctccctgggtgctctctgagatctcccagatcattcctttatcgttcgatgctaaattcagttatctccatacagacaaccacatgaagacatattataccgataactctatcatcaagggttcttggagaaacgatgccttctgtgcagatcttggagctagcctgccttttgttatttccgttccgtatcttctgaaagaagtcgaaccttttgtcaaagtacagtatatctatgcgcatcagcaagacttctacgagcgtcatgctgaaggacgcgctttcaataaaagcgagcttatcaacgtagagattcctataggcgtcaccttcgaaagagactcaaaatcagaaaagggaacttacgatcttactcttatgtatatactcgatgcttaccgacgcaatcctaaatgtcaaacttccctaatagctagcgatgctaactggatggcctatggtaccaacctcgcacgacaaggtttttctgttcgtgctgcgaaccatttccaagtgaacccccacatggaaatcttcggtcaattcgcttttgaagtacgaagttcttcacgaaattataatacaaacctaggctctaagttttgtttctag

SEQ ID NO: 155 - protein, 648 aa, Chlamydia pneumoniae
MFVMKKLVRLCVVLLSLLPNVLFSSDLLREEGIKKMMDKLIEYHVDAQEVSTDILSRSLSSYIQSFDPHKSYLSNQEVAVFLQSPETKKRLLKNYKAGNFAIYRNINQLIHESILRARQWRNEWVKNPKELVLEASSYQISKQPMQWSKSLDEVKQRQRALLLSYLSLHLAGASSSRYEGKEEQLAALCLRQIENHENVYLGINDHGVAMDRDEEAYQFHIRVVKALAHSLDAHTAYFSKDEALAMRIQLEKGMCGIGVVLKEDIDGVVVREIIPGGPAAKSGDLQLGDIIYRVDGKDIEHLSFRGVLDCLRGGHGSTVVLDIHRGESDHTIALRREKILLEDRRVDVSYEPYGDGVIGKVTLHSFYEGENQVSSEQDLRRAIQGLKEKNLLGLVLDIRENTGGFLSQAIKVSGLFMTNGVVVVSRYADGTMKCYRTVSPKKFYDGPLAILVSKSSASAAEIVAQTLQDYGVALVVGDEQTYGKGTIQHQTITGDASQDDCFKVTVGKYYSPSGKSTQLQGVKSDILIPSLYAEDRLGERFLEHPLPADCCDNVLHDPLTDLDTQTRPWFQKYYLPNLQKQETLWREMLPQLTKNSEQRLSENSNFQAFLSQIKSSEKTDLSYGSNDLQLEESINILKDMILLQQCRK

SEQ ID NO: 156 - DNA, 1947 bp, Chlamydia pneumoniae
atgttcgtaatgaaaaaacttgtccgtctatgcgtagttcttctttctttacttccgaatgtattattttcttcggatcttttacgagaagagggcatcaaaaagatgatggacaagctgatcgagtatcatgtcgatgctcaagaggtttctacggatatactctcgcgttctttatctagttacattcaatcttttgatcctcataaatcttatctttcaaaccaagaggttgcagtttttctacagtctccggaaacaaagaaacgtctcttaaagaattataaggcaggcaactttgctatttatcgcaacatcaatcaattaattcatgagagtattcttcgtgccaggcagtggagaaacgaatgggttaagaatccaaaagagcttgtattggaggcatcctcatatcagatatcgaagcaacctatgcaatggagcaaatctttagacgaagtgaagcagagacaacgcgctctactcctttcctatctttctttacatcttgctggagcttcttcctctcgttatgagggtaaagaagagcagcttgctgctctgtgtctacgtcaaatcgagaaccatgagaatgtatatttaggtatcaacgatcatggtgttgctatggatcgggatgaagaagcctaccaattccatatccgtgttgttaaagctttagctcatagcttagatgcacatacggcgtatttcagtaaggacgaagcgttggcgatgcgaatccaactagaaaaaggcatgtgtggaattggtgttgttctgaaggaagatattgatggagttgttgttagagaaatcattcctgggggacctgcggctaaatctggggatcttcagcttggagatatcatctatcgggtggatggcaaggatatcgagcatctttctttccgcggtgttttagattgtttacgtggaggtcatggctctactgtagtcttagatatccatcgtggggagagcgatcatacgatcgccttgagaagggagaaaatccttttagaagaccgtcgtgtggatgtttcctatgagccttatggagatggtgtgattgggaaagttacgttacattctttttatgaaggagaaaatcaggtttctagtgaacaagatctacgtcgagcgattcagggattaaaggagaagaaccttcttggattagttttagatatccgagaaaatacgggtggatttttatctcaagcgatcaaagtttctggtttatttatgaccaatggcgttgtggttgtatctcgctatgctgatggtaccatgaagtgctaccgcacagtatctcctaaaaaattctatgatggtcctttggctattttagtatctaaaagttccgcatcagcagcggagattgtagcacaaactctccaagattatggagttgctttagttgttggagatgagcagacctatgggaagggaacgattcagcatcaaacaattactggagatgcctctcaggacgattgttttaaggttactgtagggaaatattattccccttctgggaaatcgactcaacttcagggagtaaaatccgatattttaattccttctctctatgctgaagatcgtctaggagagcgttttctagagcatcccttacctgcagattgctgtgataatgtacttcacgatcctctcacggacttggatactcaaacacgtccttggtttcaaaaatactatcttcctaatctacaaaagcaagagactctttggagagagatgctacctcagcttacgaaaaacagtgagcaaaggctttctgagaattcgaattttcaggcatttttgtcgcagataaaatcatctgaaaaaacggacctatcctatggttccaatgatttacaattggaagagtcgataaacattttgaaggacatgattttattacaacagtgtagaaaataa

SEQ ID NO: 157 - protein, 199 aa, Chlamydia pneumoniae
MRLFSLGTIYLFFSLALSSCCGYSILNSPYHLSSLGKSLLQERIFIAPIKEDPHGQLCSALTYELSKRSFAISGRSSCAGYTLKVELLNGIDKNIGFTYAPNKLGDKTHRHFIVSNEGRLSLSAKVQLINNDTQEVLIDQCVARESVDFDFEPDLGTANAHEFALGQFEMHSEAIKSARRILSIRLAETIAQQVYYDLF

SEQ ID NO: 158 - DNA, 600 bp, Chlamydia pneumoniae
atgagattgttttctttaggcacgatttatctttttttttctctagcactttcgtcatgctgtggttactctattttaaacagcccgtatcacttatcgtctttaggtaagtctttattacaggaaagaattttcattgctcccataaaagaagatcctcatggtcagctctgctcagctctaacttatgagcttagtaagcgttcttttgctatctctggaaggagttcttgcgcaggctatactcttaaagtagagcttctgaatggtattgacaagaatataggttttacgtatgccccaaataaactcggagataagactcacaggcattttatagtctctaatgaaggcagactatcactatctgcaaaagtacagcttatcaataatgacactcaagaagtccttatagaccaatgtgttgctcgagagtctgtagactttgactttgagcctgacttaggaacagcaaacgctcatgaatttgctttaggccaatttgaaatgcatagtgaagccataaaaagtgctcgccgtatactatctatacgcctagccgagacgattgctcaacaggtatactatgaccttttttga

SEQ ID NO: 159 - protein, 337 aa, Chlamydia pneumoniae
MKKTCCQNYRSIGVVFSVVLFVLTTQTLFAGHFIDIGTSGLYSWARGVSGDGRVVVGYEGGNAFKYVDGEKFLLEGLVPRSEALVFKASYDGSVIIGISDQDPSCRAVKWVNGALVDLGIFSEGMQSFAEGVSSDGKTIVGCLYSDDTETNFAVKWDETGMVVLPNLPEDRHSCAWDASEDGSVIVGDAMGSEEIAKAVYWKDGEQHLLSNIPGAKRSSAHAVSKDGSFIVGEFISEENEVHAFVYHNGVIKDIGTLGGDYSVATGVSRDGKVIVGHSTRTDGEYRAFKYVDGRMIDLGTLGGSASFAFGVSDDGKTIVGKFETELGECHAFIYLDD

SEQ ID NO: 160 - DNA, 1014 bp, Chlamydia pneumoniae
atgaaaaagacatgttgccaaaattacagatcgataggcgttgtgttctctgtggtacttttcgttcttacaacacagacgctgtttgcaggacattttattgatattggaacttctggattatattcttgggctcgaggtgtatctggagatggccgcgttgtcgtaggttatgaaggtggcaatgcatttaaatatgttgatggtgagaaatttctgttagaaggtttggtcccgagatccgaggccttggtatttaaagcttcttatgatggctctgtaattataggaatctcggatcaagatccgtcttgccgcgctgtgaagtgggtaaacggtgcacttgttgatcttggaatattttctgagggaatgcaatcttttgcagagggtgtttccagtgatggaaagacgattgtagggtgcctatatagtgatgatacagagacaaactttgctgtgaagtgggatgaaacaggaatggttgttctccctaacttaccagaagatcgacattcttgcgcttgggatgcctctgaagatggctctgtgattgtaggggacgccatgggtagcgaggaaattgccaaggcagtgtactggaaggacggtgaacaacatctgctttctaatatcccaggagctaaaagatcgtcagcacatgcagtttctaaagatggatcttttatcgtaggcgagttcatcagtgaagaaaatgaagttcatgcctttgtttatcacaacggtgttatcaaagatatcgggactttaggaggagattactctgtagcaactggagtttctagggatggtaaggtcatcgtgggtcattctacaagaacagatggtgaataccgtgcatttaaatatgtggatggaagaatgatagatttggggactttaggaggttcagcatcttttgcttttggtgtttctgacgatggcaaaacaatcgtaggaaaatttgaaacagagctaggagaatgtcatgcctttatctaccttgatgattag

SEQ ID NO: 161 - protein, 349 aa, Chlamydia pneumoniae
MAAIKQILRSMLSQSSLWMVLFSLYSLSGYCYVITDKPEDDFHSSSAVKWDHWGKTTLSRLSNKKASAKAVSGTGATTVGFIKDTWSRTYAVRWNYWGTKELPTSSWVKKSKATGISSDGSIIAGIVENELSQSFAVTWKNNEMYLLPSTWAVQSKAYGISSDGSVIVGSAKDAWSRTFAVKWTGHEAQVLPVGWAVKSVANSVSANGSIIVGSVQDASGILYAVKWEGNTITHLGTLGGYSAIAKAVSNNGKVIVGRSETYYGEVHAFCHKNGVMSDLGTLGGSYSAAKGVSATGKVIVGMSTTANGKLHAFKYVGGRMIDLGEYSWKEACANAVSIDGEIIVGVQSE

SEQ ID NO: 162 - DNA, 1050 bp, Chlamydia pneumoniae
atggcagctataaaacaaattttacgttctatgctatctcagagtagcttatggatggtcctattttcattatattctctatctggttattgctatgtaattacagacaaaccagaagatgacttccattcttcatccgcagtaaaatgggatcattggggaaagacaactctctcaagattatcaaataaaaaagcctctgcaaaagctgtttcaggaactggtgctacaactgtcggctttataaaagacacttggtctcgaacatacgcagtaagatggaattattgggggaccaaagaactccctaccagctcatgggtaaaaaaatcaaaagcaacaggaatctcctctgatgggtctataatcgcggggattgtcgagaatgagctttctcaaagtttcgcagtcacatggaaaaacaatgaaatgtatttgctcccttccacatgggcagtgcaatctaaagcgtatggaatttcttctgatggctctgttattgtagggagtgctaaggatgcttggtcgcgaactttcgctgtgaagtggacgggacacgaggctcaggtgttaccagtaggctgggctgtcaaatctgtagcgaattctgtatctgccaatggatctataattgtagggtctgtacaagacgcctctggaattctttatgctgtaaagtgggaagggaacactattacacatctaggaactttaggaggctattctgccattgcaaaagctgtatccaataatggcaaggtcattgtagggagatccgaaacatattatggagaggtccatgctttctgtcataagaatggcgtcatgtcagacctcggcaccctcggaggatcttattctgcagctaagggagtctctgcaactggaaaagttattgtcggtatgtccacaacagcaaatgggaaattgcatgcctttaaatatgtcggtggaagaatgatcgacttaggagagtatagctggaaagaagcctgtgcaaacgctgtttctattgatggagaaattattgttggagtccaatcagaataa

SEQ ID NO: 163 - protein, 754 aa, Chlamydia pneumoniae
MVFFRNSLLHLVALSGMLCCSSGVALTIAEKMASLEHSGRGADDYEGMASFNANMREYSLQLSKLYEEARKLRASGTEDEALWKDLIRRIGEVRGYLREIEELWAAEIREKGGNLEDYALWNHPETTIYNLVTDYGTEDSIYLIPQEIGAIKIATLSKFVVPKESFEDCLTQILSRLGIGVRQVNSWIKELYMMRKEGCSVAGVFSSRKDLEALPETAYIGFVLNSNVDAHTNQHVLKKFINPETTHVDVIAGRVWIFGSAGEVGELLKIYNFVQSESIRQEYRVIPLTKIDPGEMISILNAAFREDLTKDVSEESLGLRVVPLQYQGRSLFLSGTAALVQQALTLIRELEEGIENPTDKTVFWYNVKHSDPQELAALLSQVHDVFSGENKASVGAADGCGSQLNASIQIDTTVSSSAKDGSVKYGNFIADSKTGTLIMVVEKEVLPRIQMLLKKLDVPKKMVRIEVLLFERKLAHEQKSGLNLLRLGEEVCKKGCSPSVSWAGGTGILEFLFKGSTGSSIVPGYDLAYQFLMAQEDVRINASPSVVTMNQTPARIAVVDEMSIAVSSDKDKAQYNRAQYGIMIKMLPVINVGEEDGKSYITLETDITFDTTGKNHDDRPDVTRRNITNKVRIADGETVIIGGLRCKQMSDSHDGIPFLGDIPGIGKLFGMSSTSDSLTEMFVFITPKILENPVEQQERKEEALLSSRPGEREEYYQALAASEAAARAAHKKLEMFPASGVSLSQVERQEYDGC

SEQ ID NO: 164 - DNA, 2265 bp, Chlamydia pneumoniae
atggtttttttccgtaattctttactgcatttagttgccctatccggaatgctctgttgttcttctggagtggctttaacgatagccgagaagatggcttctttagagcactcggggagaggagcagacgattatgaggggatggcttcgtttaatgccaatatgagggagtatagccttcagctgagcaagttgtatgaggaagcacgaaagctacgcgcttctggaactgaggatgaagctctgtggaaggacttaattcgacggattggtgaggtgcgaggctatcttcgagagatcgaggagctttgggctgcagaaattcgtgagaaagggggcaatctcgaggactacgccctctggaatcacccagagactacgatttacaatcttgttaccgattacggaaccgaagactctatttatttgattcctcaagaaatcggagcgattaaaatcgcaaccttatcgaaatttgtagttcctaaagagtctttcgaagactgtctcactcagatcctatctcgcttaggtattggcgtgcgtcaggtcaattcttggattaaggaactttatatgatgcgtaaggagggctgcagtgttgctggagttttttcctccagaaaagatttagaggcgctcccagaaacagcctatattggttttgtattgaattcgaacgtagatgcgcataccaatcaacatgtcttaaaaaagttcattaaccctgaaacaacgcatgtagatgtgattgcaggacgtgtgtggatttttggttctgcgggggaagtcggcgagcttctgaagatttataattttgtgcagtcggagagcatacgtcaagagtatcgggtgattcccttaactaagatcgatccaggggagatgatttccattctcaacgcagcatttcgtgaggatctgactaaagatgttagtgaagaatctttaggccttcgtgtagttcctttacagtatcaagggcgttcgttgtttttaagtggaaccgcggcgttagtgcagcaagcgctgactctcattcgagagcttgaagaagggattgagaaccctacggataaaacagtattttggtataacgtcaagcactccgatccccaagagttggcggcattgctttcccaagtccatgatgtcttctctggcgagaataaggcgagtgtcggagctgcagatggatgtgggtcgcaattaaatgcctcgatccaaattgatactacagtaagttcttctgcgaaagatggctcagtgaagtacggaaacttcatcgcggattctaagacaggaactctgattatggtggttgagaaagaagttcttccacgtattcagatgctacttaagaaactagatgtccctaaaaagatggtccgtatcgaggtgctgttatttgaaagaaaattggcacatgagcagaaatctgggttaaatcttctacgtcttggtgaggaagtttgtaaaaaagggtgcagtccttctgtgtcttgggccgggggtactggcatactagaatttttatttaaaggaagtacgggatcttcgatagttcctggttatgatctcgcctatcaatttttaatggctcaagaggacgttcggattaatgcgagtccttctgtagttactatgaaccaaaccccagcacggattgctgttgttgatgaaatgtcaatagcggtgtcttcagataaagataaagcgcaatacaatcgtgcgcagtacggtatcatgataaaaatgctccccgtaattaatgtgggagaggaagacggaaaaagttacattactttagagacagacatcacctttgatactacgggaaaaaatcatgatgatcgtcctgatgttacaaggcgtaatattactaataaggtgcgcattgctgacggagagactgtgattattggaggtttgcgttgcaaacagatgtcagattctcatgatggcattcctttccttggagacattcctggtatagggaagttatttggaatgagttccacatcagacagtctcacggagatgtttgtatttatcactccgaagatcctagaaaatcctgtagagcaacaagaacgtaaagaagaagctttactctcttcgcgccctggagagagagaagaatactatcaggctttagcagctagtgaggctgcagcacgagcagctcataaaaaattagagatgttcccggcatcaggagtatctttatctcaggtagagaggcaagaatacgatggctgctag

SEQ ID NO: 165 - protein, 334 aa, Chlamydia pneumoniae
MQPFIFTLLCLTSLVSLVAFDAANARKRCACAQTIERGENFFSIKRSACAEIEYQEKSRHASAIERISKDKGKVTPKQIAKVATKKKQRYRLLQVPFSRPPNNSRYNLYALLSEPPECYSDTASWYAIFIRLLRRAYVDTGNVPPGSEYAIANALISNKQEILERGAQLGPDVIETLTLPEEQAEIFYKMLKGSSNSQSLLNFLHYEEKSLGHCKLNLIFMDPLLLEAVLDHPDAYRETSLLRDGIWEAVKRQEHAIQEHGQAAALELFKTRTDFRLELRDKMQLLLSRYDLLPLLNKKMFDYTLGSAGDYLFLVDPDTKAISRCRCPSKSIKL

SEQ ID NO: 166 - DNA, 1005 bp, Chlamydia pneumoniae
atgcaaccttttatctttactttactgtgcttgacatctttggtttctttagtcgcctttgatgctgcgaatgctcgtaaacgttgtgcctgtgctcaaactatagaacgtggagagaacttcttttccataaaacgctctgcttgtgctgaaatcgaatatcaagaaaaatctcgccacgcctcagcaattgaaagaatctcaaaagataaaggcaaagtcactccaaagcagattgcgaaagtagctactaagaaaaagcaaagataccgtttattgcaggttcctttttcaaggcctccgaataactcaaggtataacctctatgctttgcttagtgaacctcccgaatgctatagcgatacagcatcatggtatgctatttttattcggttacttcgacgtgcttatgtagacacgggaaatgtacctcctggatctgagtatgccatcgctaatgctttgataagtaacaaacaagagattttagagaggggagcgcagcttggacccgatgttattgaaactctaacattgcctgaggaacaagccgagattttttataaaatgctcaaagggtcgtcaaactctcagtcgctactgaattttctgcattatgaagagaaaagcttaggccactgtaagctaaatctgatcttcatggatcccctactgttagaagctgttctagatcatcccgatgcttatagggaaacgtcgctcctgcgcgatggcatttgggaagcggtgaagcgtcaagaacatgccatccaagaacatggccaggcagctgctttggagctttttaaaacacgcaccgacttccgcctggagctgcgagataagatgcagttacttctaagtcgatacgatttgctccccttattaaataaaaaaatgttcgactacaccttaggaagtgccggagattacttatttttggtagacccagatactaaggcaatttctcgatgtcgctgcccttcaaagagtattaaattataa

SEQ ID NO: 167 - protein, 233 aa, Chlamydia pneumoniae
MNRRDMVITAVVVNAILLVALFVTSKRIGVKDYDEGFRNFASSKVTQAVVSEEKVIEKPVVAEVPSRPIAKETLAAQFIESKPVIVTTPPVPVVSETPEVPTVAVPPQPVRETVKEEQAPYATVVVKKGDFLERIARANHTTVAKLMQINDLTTTQLKIGQVIKVPTSQDVSNEKTPQTQTANPENYYIVQEGDSPWTIALRNHIRLDDLLKMNDLDEYKARRLKPGDQLRIR

SEQ ID NO: 168 - DNA, 702 bp, Chlamydia pneumoniae
atgaatcgtagagacatggtaataacagctgtcgtagtgaatgctatattgcttgtggctcttttcgtcacatcaaagcgtattggcgtcaaggactatgacgagggattccgtaattttgcttctagcaaggttacacaagcagtagtttcagaagaaaaagtcatagaaaagcctgtagtcgcagaagtgcctagccgtcctatcgctaaagagactctagctgcacagtttattgaaagtaagccggttattgtaaccacaccacccgtgcctgttgttagcgaaaccccagaagtgcctactgtggcagttccgcctcagcctgttcgtgagacagtaaaagaggaacaagctccttatgctactgttgtagtgaaaaaaggagattttctcgaacgcattgcgagagcaaatcatactaccgttgcaaaattgatgcagatcaatgatcttaccaccacccaacttaaaattggtcaggtcatcaaagtccctacgtctcaagatgtcagcaacgaaaaaactcctcaaacacagaccgcaaaccctgaaaattattatatcgtccaagaaggggatagcccgtggacaatagcattgcgtaaccatattcgattggatgatttgctaaaaatgaatgatctcgatgaatataaagcccggcgccttaagcctggagatcagttgcgcatacgttga

SEQ ID NO: 169 - protein, 809 aa, Chlamydia pneumoniae
MKGTPQYHFIGIGGIGMSALAHILLDRGYEVSGSDLYESYTIESLKAKGARCFSGHDSSHVPHDAVVVYSSSIAPDNVEYLTAIQRSSRLLHRAELLSQLMEGYESILVSGSHGKTGTSSLIRAIFQEAQKDPSYAIGGLAANCLNGYSGSSKIFVAEADESDGSLKHYTPRAVVITNIDNEHLNNYAGNLDNLVQVIQDFSRKVTDLNKVFYNGDCPILKGNVQGISYGYSPECQLHIVSYNQKAWQSHFSFTFLGQEYQDIELNLPGQHNAANAAAACGVALTFGIDINIIRKALKKFSGVHRRLERKNISESFLFLEDYAHHPVEVAHTLRSVRDAVGLRRVIAIFQPHRFSRLEECLQTFPKAFQEADEVILTDVYSAGESPRESIILSDLAEQIRKSSYVHCCYVPHGDIVDYLRNYIRIHDVCVSLGAGNIYTIGEALKDFNPKKLSIGLVCGGKSCEHDISLLSAQHVSKYISPEFYDVSYFIINRQGLWRTGKDFPHLIEETQGDSPLSSEIASALAKVDCLFPVLHGPFGEDGTIQGFFEILGKPYAGPSLSLAATAMDKLLTKRIASAVGVPVVPYQPLNLCFWKRNPELCIQNLIETFSFPMIVKTAHLGSSIGIFLVRDKEELQEKISEAFLYDTDVFVEESRLGSREIEVSCIGHSSSWYCMAGPNERCGASGFIDYQEKYGFDGIDCAKISFDLQLSQESLDCVRELAERVYRAMQGKGSARIDFFLDEEGNYWLSEVNPIPGMTAASPFLQAFVHAGWTQEQIVDHFIIDALHKFDKQQTIEQAFTKEQDLVKR

SEQ ID NO: 170 - DNA, 2430 bp, Chlamydia pneumoniae
atgaagggaactcctcagtatcattttatcggtatcggtggtataggaatgagcgctttagctcatattttgcttgatcgtggctatgaggtctctggaagcgacttatatgaaagctatacgatcgaaagcctgaaagctaaaggtgcgaggtgtttctcaggccatgattcctcccatgttcctcatgatgccgtcgttgtttatagctcaagtatagcccctgataatgtagagtatcttaccgctattcaaagatcatcacgtcttcttcatagagcagagctcttgagtcagcttatggagggttatgaaagcattctggtttcaggaagccatgggaagacagggacctcatctctaattcgagcgattttccaggaagctcagaaagatccctcctatgctattggaggactcgctgcaaactgcctgaatgggtattctggatcatcgaaaatcttcgttgccgaagccgatgaaagtgatgggtctttaaagcactacactccccgtgcagtagtcattacaaatatagataatgaacatttgaataattacgctgggaatcttgataacctggttcaggtaatccaggacttctctagaaaagtaacagatctcaataaggtattctataacggggattgtcctattttgaaaggaaatgtccaagggatttcttatggatattcaccagaatgtcaattgcatatcgtttcctataatcaaaaggcatggcaatctcacttttcctttacctttttaggccaggagtatcaagacattgagctcaatctccctggacaacataacgctgcaaatgcagcagcagcctgtggagttgctcttacctttggcatagacataaacatcattcgaaaagctctcaaaaaattctcgggagttcatcgacgtctagaaagaaaaaatatatccgaaagctttcttttcttagaagattatgctcatcatcctgtagaggttgcacataccctgcgctctgtgcgtgatgctgtgggtttgcgaagagtcatcgcaatttttcaaccacatcgattctctcgtttagaagagtgcttacaaaccttccccaaagctttccaagaagctgatgaagtcatacttacagatgtctatagtgccggagaaagtcctagagagtctatcattctttccgaccttgcggaacagattcgtaagtcttcttatgtccattgttgttatgttccccatggagacatcgtagattatctacgaaactacattcgcattcatgatgtctgtgtttctctaggagctggaaatatctatactattggagaggctttaaaagactttaaccctaaaaaattatccataggactcgtctgtggagggaaatcttgcgaacacgatatttctctactttctgctcaacatgtctctaaatatatttctcctgaattctatgatgtgagttacttcatcataaatcgtcagggcttatggagaacaggaaaggattttcctcatcttattgaagagactcaaggggattcgccactttcttctgaaatcgcttcagctttagcaaaagtcgactgtttgtttcccgtgctccatggcccatttggagaggatggtacgatccagggattttttgaaatcttaggaaaaccttatgccggaccctcactatctttagcagcaactgcaatggataagctgttaacaaaacgaattgcatcagcagtgggtgttcctgtagtcccttaccaacctttaaatctctgtttctggaaacgcaatccagaactatgtattcagaatcttatagagacattttctttccctatgattgtaaaaactgcacatttgggatctagtattgggatatttttagtccgtgataaagaggaattacaagaaaagatctcagaagcatttctatatgacacggatgtgtttgtggaggaaagtcgcttagggtctcgtgaaatcgaagtgtcctgtatcggccattcttctagctggtattgtatggcagggcctaatgaacgctgtggtgctagtgggtttattgattatcaagagaaatatggatttgatggcatagattgcgcaaagatctcttttgatttacagctctcacaagaatctttagattgtgttagagaacttgcagagcgtgtctaccgagcaatgcaaggaaaaggttcagctcgaatagattttttcttggatgaagaggggaattattggttgtcagaggtcaatcctattccaggaatgacagcagctagcccatttttacaagcttttgttcacgcaggatggacgcaagaacaaattgtagatcactttattatagatgctctacataagtttgataagcagcagactatcgaacaggcattcactaaagaacaagatttagttaaaagataa

SEQ ID NO: 171 - protein, 166 aa, Chlamydia pneumoniae
MKFWLQGCAFVGCLLLTLPCCAARRRASGENLQQTRPIAAANLQWESYAEALEHSKQDHKPICLFFTGSDWCMWCIKMQDQILQSSEFKHFAGVHLHMVEVDFPQKNHQPEEQRQKNQELKAQYKVTGFPELVFIDAEGKQLARMGFEPGGGAAYVSKVKSALKLR

SEQ ID NO: 172 - DNA, 501 bp, Chlamydia pneumoniae
atgaaattttggttgcaaggatgtgcttttgtcggttgtctgctattgactttaccttgttgtgctgcacgaagacgtgcttctggagaaaatttgcaacaaactcgtcctatagcagctgcaaatctacaatgggagagctatgcagaagctcttgaacattctaaacaagatcacaaacctatttgtcttttctttacaggatcagactggtgtatgtggtgcataaaaatgcaagaccagattttgcaaagctctgagtttaagcattttgcgggtgtgcatctgcatatggttgaagttgatttcccccaaaagaatcatcaacctgaagagcagcgccaaaaaaatcaagaactgaaagctcaatataaagttacaggattccccgaactggtcttcatagatgcagaaggaaaacagcttgctcgcatgggatttgagcctggtggtggagctgcttacgtaagcaaggtgaagtctgctcttaaactacgttaa

SEQ ID NO: 173 - protein, 380 aa, Chlamydia pneumoniae
MIPSPTPINFRDDTILETDPKPSLIMFSSKKTEIASERRKAHPTLFKVLGTIWNIVKFIISIILFLPLALLWVLKKTCQFFILPSSIISQSMSKTAVAIRRMTFLSHIKQLLSLKEISAADRVVIQYDDLVVDSLAIKIPHALPHRWILYSQGNSGLMENLFDRGDSSLHQLAKATGSNLLVFNYPGIMSSKGEAKRENLVKSYQACVRYLRDEETGPKANQIIAFGYSLGTSVQAAALDREVTDGSDGTSWIVVKDRGPRSLADVANQICKPIASAIIKLVGWNIDSVKPSERLRCPEIFIYNSNHDQELISDGLFERENCVATPFLELPEVKTSGTKIPIPERDLLHLNPLSPNVVDRLAAVISNYLDSENRKSQQPD

SEQ ID NO: 174 - DNA, 1143 bp, Chlamydia pneumoniae
atgatcccatcccctaccccaataaactttcgtgatgatacgattctagagacggatccaaagccgtctttaatcatgttctcttcaaaaaaaacagagatagcttctgaaagacggaaggcccatcccaccttatttaaagttctaggaacgatttggaatattgtgaagtttattatctcaatcattctgttccttcccttagcgttattgtgggtactcaagaaaacctgtcagtttttcattctcccatcttctatcatatctcagagcatgtcaaaaacagctgtggcaattcggcgaatgacctttctgtcccatattaaacaactcctaagccttaaggaaatctcagctgccgatcgtgtggttatacaatatgacgatttggtggttgatagcttagctataaagatacctcatgctcttccccacaggtggattctttattctcaaggaaactctggattgatggaaaacctgttcgatcggggcgattcctctctacaccagctagccaaagcaaccggctcgaatcttcttgtgttcaactatcctggaattatgtccagcaaaggagaagcgaaacgagaaaatctggttaaatcgtatcaggcatgcgtacgctacctacgagatgaagagacaggtcctaaagccaatcaaatcatagctttcggatactctttgggaactagtgtccaagctgctgctctagatcgtgaggtcactgatggcagtgatggaacttcatggattgttgtaaaagatcggggccctcgctctctagcagatgtcgcgaatcaaatttgtaagcccatagcttccgcgattataaaactcgttggttggaacatagactctgtgaaacctagcgaaagattgcgttgtcccgaaattttcatttacaactctaatcatgatcaagaactcattagcgacggcctcttcgaaagagaaaattgcgtagcaacaccttttctagagcttcctgaagtaaaaacctcggggactaaaattcctatacccgaaagggatcttctccatctaaatcctctcagtccaaatgtagtagacagattagcagcagtgatctctaattatttagattctgaaaacagaaagtctcagcaacctgattaa

SEQ ID NO: 175 - protein, 158 aa, Chlamydia pneumoniae
MLPISILLFYVILGCLSAYIADKKKRNVIGWFFAGAFFGFIGLVVLLLLPSRRNALEKPQNDPFDNSDLFDDLKKSLAGNDEIPSSGDLQEIVIDTEKWFYLNKDRENVGPISFEELVVLLKGKTYPEEIWVWKKGMKDWQRVKDVPSLQQALKEASK

SEQ ID NO: 176 - DNA, 477 bp, Chlamydia pneumoniae
atgctccctatttcgattttattattttatgtgattctaggttgtctatctgcctacatagcagataagaaaaaacgaaatgttattggctggttttttgcaggagcattttttggatttattggtctagttgtccttcttcttcttccttctcgtcgaaacgctttagaaaagccacaaaacgatccttttgataactccgatctttttgatgatttgaaaaaaagtttagcaggtaatgacgagataccctcatcgggagatcttcaagaaatcgttatcgatacagagaagtggttttatttaaataaagatagagaaaacgtaggtccgatatcttttgaggagttggtcgtacttttaaagggaaaaacgtatccagaagaaatttgggtatggaaaaagggaatgaaagattggcaacgagtgaaggatgttccatcactacaacaggctttgaaagaagcatcaaaataa

SEQ ID NO: 177 - protein, 343 aa, Chlamydia pneumoniae
MEVYSFHPAVRTSFQHRVMAALDAWFFLGGHRLKVVSLDSCNSGWAYQELVSISTTEKVLKLLSYLLVPIVIIALLIRCLLHSNFRIDVEKERWLKIRELGIDIESCKLPSSYVNQVSSFIWFEKDKSKRPRIDVDYHTLHSKDWVVFPIVFQKIPKTSRFSYWFSQKETRKRDYVRNMLDHVIGYLTSEGGEWLQYISKTSYQSATSLDPERVLQYCLTDNQELQGEVQRLLNEESATKSSGDKEVLLSHVSDIICQCWWPKFLEVIQSPAFIEELVEEVSGKLNLDFLCLEKANTLDQELRNSLLRAVVHHGSEGVDIKKVGAGLIIYTEAIQLQIPFSRS

SEQ ID NO: 178 - DNA, 1032 bp, Chlamydia pneumoniae
atggaagtttatagttttcaccctgcggtaaggacttcgtttcagcaccgtgtaatggcagcactagatgcttggttttttctaggagggcaccgtttaaaagtagtttctctagatagttgtaactcaggttgggcgtatcaagaacttgtgtctatttcaacgacagaaaaagtcttgaaactactctcttacctactcgtaccgattgtcataatagctctgttaattcgttgtcttttacatagcaattttaggatagacgtagagaaggaacgttggttaaaaataagggagttaggaattgatatagaaagctgcaaactccccagttcttatgtaaaccaggtttcctcgtttatttggtttgaaaaagataaatccaaacggccacgtattgatgtagattatcatacgctacatagcaaagactgggtagttttccctatcgtttttcagaaaattccaaagacctcgcgtttcagttattggttctcacaaaaagaaacaaggaagagggattatgtgagaaatatgctggaccacgtcattggttatctaacgtcagaaggtggggagtggttgcagtatatatcgaaaacctcttatcaaagcgctacttccttggatcctgaaagagttcttcaatattgcttaactgataaccaggagctccagggagaagtgcaacgtttgcttaatgaggagagtgcgaccaaaagctctggggataaggaagttttgttaagtcatgtatctgacattatttgccagtgttggtggccaaagtttcttgaagttatacaatctccggcctttattgaagaattagtagaagaagtgagtggtaaacttaatttagattttttatgcctagaaaaggctaatacattagatcaggagttgagaaacagtcttctaagagcagtcgtacaccacggttctgaaggagttgatattaagaaagttggtgccggcctcattatttatacggaagctattcaattacagattcccttctcaaggagttaa

SEQ ID NO: 179 - protein, 619 aa, Chlamydia pneumoniae
MKKGKLGAIVFGLLFTSSVAGFSKDLTKDNAYQDLNVIEHLISLKYAPLPWKELLFGWDLSQQTQQARLQLVLEEKPTTNYCQKVLSNYVRSLNDYHAGITFYRTESAYIPYVLKLSEDGHVFVVDVQTSQGDIYLGDEILEVDGMGIREAIESLRFGRGSATDYSAAVRSLTSRSAAFGDAVPSGIAMLKLRRPSGLIRSTPVRWRYTPEHIGDFSLVAPLIPEHKPQLPTQSCVLFRSGVNSQSSSSSLFSSYMVPYFWEELRVQNKQRFDSNHHIGSRNGFLPTFGPILWEQDKGPYRSYIFKAKDSQGNPHRIGFLRISSYVWTDLEGLEEDHKDSPWELFGEIIDHLEKETDALIIDQTHNPGGSVFYLYSLLSMLTDHPLDTPKHRMIFTQDEVSSALHWQDLLEDVFTDEQAVAVLGETMEGYCMDMHAVASLQNFSQSVLSSWVSGDINLSKPMPLLGFAQVRPHPKHQYTKPLFMLIDEDDFSCGDLAPAILKDNGRATLIGKPTAGAGGFVFQVTFPNRSGIKGLSLTGSLAVRKDGEFIENLGVAPHIDLGFTSRDLQTSRFTDYVEAVKTIVLTSLSENAKKSEEQTSPQETPEVIRVSYPTTTSAS

SEQ ID NO: 180 - DNA, 1860 bp, Chlamydia pneumoniae
atgaaaaaagggaaattaggagccatagtttttggccttctatttacaagtagtgttgctggtttttctaaggatttgactaaagacaacgcttatcaagatttaaatgtcatagagcatttaatatcgttaaaatatgctcctttaccatggaaggaactattatttggttgggatttatctcagcaaacacagcaagctcgcttgcaactggtcttagaagaaaaaccaacaaccaactactgccagaaggtactctctaactacgtgagatcattaaacgattatcatgcagggattacgttttatcgtactgaaagtgcgtatatcccttacgtattgaagttaagtgaagatggtcatgtctttgtagtcgacgtacagactagccaaggggatatttacttaggggatgaaatccttgaagtagatggaatggggattcgtgaggctatcgaaagccttcgctttggacgagggagtgccacagactattctgctgcagttcgttccttgacatcgcgttccgccgcttttggagatgcggttccttcaggaattgccatgttgaaacttcgccgacccagtggtttgatccgttcgacaccggtccgttggcgttatactccagagcatatcggagatttttctttagttgctcctttgattcctgaacataaacctcaattacctacacaaagttgtgtgctattccgttccggggtaaattcacagtcttctagtagctctttattcagttcctacatggtgccttatttctgggaagaattgcgggttcaaaataagcagcgttttgacagtaatcaccatatagggagccgtaatggatttttacctacgtttggtcctattctttgggaacaagacaaggggccctatcgttcctatatctttaaagcaaaagattctcagggcaatccccatcgcataggatttttaagaatttcttcttatgtttggactgatttagaaggacttgaagaggatcataaggatagtccttgggagctctttggagagatcatcgatcatttggaaaaagagactgatgctttgattattgatcagacccataatcctggaggcagtgttttctatctctattcgttactatctatgttaacagatcatcctttagatactcctaaacatagaatgattttcactcaggatgaagtcagctcggctttgcactggcaagatctactagaagatgtcttcacagatgagcaggcagttgccgtgctaggggaaactatggaaggatattgcatggatatgcatgctgtagcctctcttcaaaacttctctcagagtgtcctttcttcctgggtttcaggtgatattaacctttcaaaacctatgcctttgctaggatttgcacaggttcgacctcatcctaaacatcaatatactaaacctttgtttatgttgatagacgaggatgacttctcttgtggagatttagcgcctgcaattttgaaggataatggccgcgctactctcattggaaagccaacagcaggagctggaggttttgtattccaagtcactttccctaaccgttctggaattaaaggtctttctttaacaggatctttagctgttaggaaagatggtgagtttattgaaaacttaggagtggctcctcatattgatttaggatttacctccagggatttgcaaacttccaggtttactgattacgttgaggcagtgaaaactatagttttaacttctttgtctgagaacgctaagaagagtgaagagcagacttctccgcaagagacgcctgaagttattcgagtctcttatcccacaacgacttctgcttcgtaa

SEQ ID NO: 181 - protein, 486 aa, Chlamydia pneumoniae
MNMPVPSAVPSANITLKEDSSTVSTASGILKTATGEVLVSCTALEGSSSTDALISLALGQIILATQQELLLQSTNVHQLLFLPPEVVELEIQVVDLLVQLEHAETITSEPQETQTQSRSEQTLPQQSSSKQSALSPRSLKPEISDSKQQQALQTPKDSAVRKHSEAPSPETQARASLSQASSSSQRSLPPQESAPERTLLEQQKASSFSPLSQFSAEKQKEALTTSKSHELYKERDQDRQQREQHDRKHDQEEDAESKKKKKKRGLGVEAVAEEPGENLDIAALIFSDQMRPPAEETSKKETTFKKKLPSPMSVFSRFIPSKNPLSVGSSIHGPIQTPKVENVFLRFMKLMARILGQAEAEANELYMRVKQRTDDVDTLTVLISKINNEKKDIDWSENEEMKALLNRAKEIGVTIDKEKYTWTEEEKRLLKENVQMRKENMEKITQMERTDMQRHLQEISQCHQARSNVLKLLKELMDTFIYNLRP

SEQ ID NO: 182 - DNA, 1461 bp, Chlamydia pneumoniae
atgaatatgcctgttccttctgcagttccctctgcaaatataactctaaaagaagacagctcaacagtttccacagcctctggaatattaaagactgcaacaggtgaagtcttagtctcttgtacagcgctagaaggaagctcttctacagatgctttaattagcttagctttaggacaaatcattcttgcgacccaacaagaactgctcttacaaagcacaaatgttcatcaactcctcttcctccctcctgaagttgtagaattagaaatccaagttgttgacttgctagtgcaattggaacatgcagagacaatcacaagtgaaccacaagaaacacaaacgcaaagtaggagtgagcagaccctccctcaacaaagcagcagtaaacaatctgctctctccccacgctccttaaaacctgaaatttctgattctaaacaacagcaagctcttcaaacaccaaaagactctgctgtaagaaaacacagcgaagcaccgtcacctgagacacaagctcgcgcttccttatctcaggcaagctcaagttctcagagatccttacctccgcaagaaagtgcgccagaaagaacactattagaacaacaaaaagcaagctccttctctcctctatcccagttctctgcagagaaacaaaaagaggccctgacgacctcaaaatctcatgaactctataaagaacgcgatcaagatcgccaacaaagagagcagcacgacagaaagcacgatcaggaagaagacgctgaatctaaaaagaaaaagaagaaacgtggtctcggtgtagaggcagtcgctgaggaacccggagaaaatctagatattgccgctttaatcttctcagatcaaatgcgacctcctgctgaagaaacttctaaaaaagaaacgacattcaaaaagaagctaccttctccaatgtctgtgtttagcagattcatccctagtaagaatccgttatctgtaggctcttcaatacacgggcctatacaaactccaaaagtagaaaatgtgttcttaaggttcatgaagctcatggcaagaatcttaggccaagccgaagccgaagctaatgaactctacatgcgagtcaaacaacgtaccgatgatgtagacacactcacagtccttatctctaagatcaataatgaaaagaaagacattgattggagtgaaaatgaagagatgaaagctcttttaaatcgagctaaagagattggagtcactatagacaaagaaaaatatacttggacagaagaggaaaaaagacttctaaaagagaatgtccaaatgcgcaaagagaatatggagaaaatcactcaaatggaaaggacggacatgcaaaggcacctccaagagatttctcaatgtcatcaagcgcgctctaatgtattgaagttattgaaagaacttatggacaccttcatttacaacctacgcccctaa

SEQ ID NO: 183 - protein, 289 aa, Chlamydia pneumoniae
MLKIQKKRMCVSVVITVGAIVGFFNSADAAPKKKKIPIQILYSFTKVSSYLKNEDASTIFCVDVDRGLLQHRYLGSPGWQETRRRQLFKSLENQSYGNERLGEETLAIDIFRNKECLESEIPEQMEAILANSSALVLGISSFGITGIPATLHSLLRQNLSFQKRSIASESFLLKIDSAPSDASVFYKGVLFRGETAIVDALSQLFAQLDLSPKKIIFLGEDPEVVQAVGSACIGWGMNFLGLVYYPAQESLFSYVHPYSTATELQEAQGLQVISDEVAQLTLNALPKMN

SEQ ID NO: 184 - DNA, 870 bp, Chlamydia pneumoniae
atgttgaaaatccagaaaaaaagaatgtgtgtcagcgtagtcatcacggtaggcgccatagtggggtttttcaattctgcagacgcagcaccaaagaaaaagaagatccctatacagattctctactcctttactaaagtctcttcctatttaaaaaacgaagacgcaagtactatattttgcgtcgatgtggatcgtggacttctccagcatcggtatttaggtagtccaggatggcaggaaaccagacgtcggcagttatttaaatccttagaaaatcaatcatacggcaacgaacgtttaggagaagaaactcttgctattgatattttcaggaacaaagagtgcttggagagcgagatcccagagcagatggaagctatccttgcaaattcctcggccttggtcttaggcatctcttcttttgggatcacaggaattcctgcgactttgcatagtttgcttcgacagaatctatctttccaaaaacgctctatagcatcggagagcttccttttaaagatcgatagtgccccctcagatgcctctgttttttataaaggcgtgcttttccgcggagagactgcgatcgtggatgcgttaagccaattatttgcccagctcgatctttctcctaaaaaaattatctttctaggagaagaccctgaggtcgttcaagctgttgggtctgcttgtataggttggggcatgaactttttaggcctggtatactatcctgctcaagaaagccttttttcttatgttcatccttactctacagcaacggagctccaagaagcacagggtttacaagtaatttcagatgaagtcgcacagcttactttaaacgctcttccgaaaatgaattaa

SEQ ID NO: 185 - protein, 116 aa, Chlamydia pneumoniae
MMHNIVVLSEEPGRSAFLGRTAFFPNKYPIAQGGVGIPSTIGNLFTIWYCFYFYRAATPQSDHPDGCGFILLERLKELGAGFFYCDLRESNTTGFTLFFEGSNKGVLKNHLFIRDE

SEQ ID NO: 186 - DNA, 351 bp, Chlamydia pneumoniae
atgatgcacaatattgttgttcttagtgaggaacctggacgaagcgcttttcttggtaggacggcatttttccctaataagtatccaatagctcagggtggtgttggaataccatctacaataggcaatctctttactatatggtactgtttctatttttatagagctgcaactccacaatctgatcatcctgacggatgtggctttattctactagaaaggcttaaggagctcggtgcagggttcttttattgtgatcttcgtgagtccaataccactggctttactcttttttttgaaggctccaataaaggtgtgttaaagaatcacttgtttattagagatgagtaa

SEQ ID NO: 187 - protein, 184 aa, Chlamydia pneumoniae
VASETYPSQILHAQREVRDAYFNQADCHPARANQILEAKKICLLDVYHTNHYSVFTFCVDNYPNLRFTFVSSKNNEMNGLSNPLDNVLVEAMVRRTHARNLLAACKIRNIEVPRVVGLDLRSGILISKLELKQPQFQSLTEDFVNHSTNQEEARVHQKHVLLISLILLCKQAVLESFQEKKRSS

SEQ ID NO: 188 - DNA, 555 bp, Chlamydia pneumoniae
gtggcgtctgaaacgtatccttctcagatattgcacgctcagagggaagtacgtgatgcctattttaatcaagcggattgccatcctgctcgggctaatcagattctcgaggctaagaaaatctgtttattagatgtttatcatactaatcattattccgtatttactttttgtgtagataattatccgaatctccgctttacatttgtatcttcaaaaaacaatgagatgaatggcttatctaatcctctagataatgttcttgtagaggctatggtacgtagaacacatgcaagaaacctacttgcagcgtgtaaaattcgaaatattgaggttccaagggttgttgggcttgacctaagatctgggatactcatttcgaaactagaattgaagcaacctcagttccaaagtttaacagaagacttcgtaaatcattccacaaatcaggaagaagctcgcgtccatcaaaagcatgtgttgctaatttctttaattttactttgcaagcaggccgttctggaatcattccaggaaaaaaagcgatcctcttaa

SEQ ID NO: 189 - protein, 113 aa, Chlamydia pneumoniae
MRELNAFELTQPEEYRNRWVLMPCLKCRFCRTQHAKVWSYRCVHEASLYEKNCFLTLTYDDKHLPQYGSLVKLHLQLFLKRLRKMISPHKIRYFECGAYGTKLQRPHYHLLLS

SEQ ID NO: 190 - DNA, 342 bp, Chlamydia pneumoniae
ttgcgagaattaaatgcttttgaattaactcaacctgaagagtatcgaaaccgttgggttttgatgccttgtcttaagtgtcgtttttgtagaacgcaacatgcaaaagtctggtcttatcgttgtgtccatgaagcttctttgtatgagaaaaattgttttcttactttgacttatgatgataagcatttacctcagtatggttcgttggtaaagctgcatttacagctgtttcttaagagattaagaaagatgatttctcctcataaaattcgttattttgaatgtggtgcgtatggaaccaaattacaaagacctcattatcatctacttttatcatga

SEQ ID NO: 191 - protein, 297 aa, Chlamydia pneumoniae
MRRFLFLILSSLPLVAFSADNFTILEEKQSPLSRVSIIFALPGVTPVSFDGNCPIPWFSHSKKTLEGQRIYYSGDSFGKYFVVSALWPNKVSSAVVACNMILKHRVDLILIIGSCYSRSQDSRFGSVLVSKGYINYDADVRPFFERFEIPDIKKSVFATSEVHREAILRGGEEFISTHKQEIEELLKTHGYLKSTTKTEHTLMEGLVATGESFAMSRNYFLSLQKLYPEIHGFDSVSGAVSQVCYEYSIPCLGVNILLPHPLESRSNEDWKHLQSEASKIYMDTLLKSVLKELCSSH

SEQ ID NO: 192 - DNA, 894 bp, Chlamydia pneumoniae
atgcgtcgttttctgtttcttattcttagctctcttcctttggtcgcattctctgctgataatttcactattctagaagaaaaacagagtcctttaagtcgtgtaagtattatttttgctttacctggggttactcccgtttcttttgatggtaattgtcctattccttggttttctcatagtaaaaagactctagagggacagagaatttattactctggcgactcctttgggaaatactttgtagtttctgctctttggcctaataaagtttcttcagctgttgtggcttgtaatatgattcttaaacatcgagtggatcttattctaattataggctcgtgttactctaggtctcaagatagccgttttggcagcgtcttagtttctaaaggctacattaattatgatgcagatgtgaggcctttctttgaaagatttgagattccagacattaaaaagagtgtttttgcaaccagtgaggttcatcgggaggcaattcttcgtggaggcgaagagtttatttctacccataaacaagaaatcgaagagcttttgaagactcatgggtatttgaaatcaacaaccaaaacggagcacaccttaatggaaggtttggttgctacaggcgagtctttcgcgatgtcgcgaaactattttctttccttacaaaaattgtatccagagattcatggttttgatagtgtcagcggcgctgtttctcaggtatgctatgaatatagcattccttgtttaggtgtgaatatccttctccctcatcctttagaatcacggagtaacgaggattggaagcatcttcaaagtgaggcaagtaaaatttatatggataccttgctcaagagtgtattaaaagaactctgttcttctcattaa

SEQ ID NO: 193 - protein, 181 aa, Chlamydia pneumoniae
MSLLNLPSSQDSASEDSTSQSQIFDPIRNRELVSTPEEKVRQRLLSFLMHKLNYPKKLIIIEKELKTLFPLLMRKGTLIPKRRPDILIITPPTYTDAQGNTHNLGDPKPLLLIECKALAVNQNALKQLLSYNYSIGATCIAMAGKHSQVSALFNPKTQTLDFYPGLPEYSQLLNYFISLNL

SEQ ID NO: 194 - DNA, 546 bp, Chlamydia pneumoniae
atgtccttattgaaccttccctcaagccaggattctgcatctgaggactccacatcgcaatctcaaatcttcgatcccattagaaatcgggagttagtttctactcccgaagaaaaagtccgccaaaggttgctctccttcctaatgcataagctgaactaccctaagaaactcatcatcatagaaaaagaactcaaaactctttttcctctgcttatgcgtaaaggaaccctaatcccaaaacgccgcccagatattctcatcatcactccccccacatacacagacgcacagggaaacactcacaacctaggcgacccaaaacccctgctacttatcgaatgtaaggccttagccgtaaaccaaaatgcactcaaacaactccttagctataactactctatcggagccacctgcattgctatggcagggaaacactctcaagtgtcagctctcttcaatccaaaaacacaaactcttgatttttatcctggcctcccagagtattcccaactcctaaactactttatttctttaaacttatag

SEQ ID NO: 195 - protein, 213 aa, Chlamydia pneumoniae
MSVNPSGNSKNDLWITGAHDQHPDVKESGVTSANLGSHRVTASGGRQGLLARIKEAVTGFFSRMSFFRSGAPRGSQQPSAPSADTVRSPLPGGDARATEGAGRNLIKKGYQPGMKVTIPQVPGGGAQRSSGSTTLKPTRPAPPPPKTGGTNAKRPATHGKGPAPQPPKTGGTNAKRAATHGKGPAPQPPKGILKQPGQSGTSGKKRVSWSDED

SEQ ID NO: 196 - DNA, 642 bp, Chlamydia pneumoniae
atgtctgttaatccatcaggaaattccaagaacgatctctggattacgggagctcatgatcagcatcccgatgttaaagaatccggggttacaagtgctaacctaggaagtcatagagtgactgcctcaggaggacgccaagggttattagcacgaatcaaagaagcagtaaccgggttttttagtcggatgagcttcttcagatcgggagctccaagaggtagccaacaaccctctgctccatctgcagatactgtacgtagcccgttgccgggaggggatgctcgcgctaccgagggagctggtaggaacttaattaaaaaagggtaccaaccagggatgaaagtcactatcccacaggttcctggaggaggggcccaacgttcatcaggtagcacgacactaaagcctacgcgtccggcacccccacctcctaaaacgggtggaactaatgcaaaacgtccggcaacgcacgggaagggtccagcaccccagcctcctaaaacaggtgggaccaatgctaagcgcgcagcaacgcatgggaaaggtccagcacctcaacctcctaagggcattttgaaacagcctgggcagtctgggacttcaggaaagaagcgtgtcagctggtctgacgaagattaa

SEQ ID NO: 197 - protein, 274 aa, Chlamydia pneumoniae
MLLGFLCDCPCASWQCAAVANCYDSVFMSRPEHKPNIPYITKATRRGLRMKTLAYLASLKDARQLAYDFLKDPGSLARLAKALIAPKEALQEGNLFFYGCSNIEDILEEMRRPHRILLLGFSYCQKPKACPEGRFNDACRYDPSHPTCASCSIGTMMRLNARRYTTVIIPTFIDIAKHLHTLKKRYPGYQILFAVTACELSLKMFGDYASVMNLKGVGIRLTGRICNTFKAFKLAERGVKPGVTILEEDGFEVLARILTEYSSAPFPRDFCEIH

SEQ ID NO: 198 - DNA, 825 bp, Chlamydia pneumoniae
atgcttctagggtttttgtgtgactgcccctgtgcttcgtggcagtgtgcggccgttgctaattgttatgattccgtatttatgtctagaccagagcacaaacctaatattccttatattactaaagctacaagacggggtctgcgtatgaagacgcttgcttatctggcctctttaaaagatgctagacagcttgcctatgattttctgaaagatcctggttctttagctcggttagctaaggctttgatagctcctaaggaggccttacaggagggcaacctatttttttatggctgtagtaatattgaggatattttagaggagatgcgtcgtcctcatagaatccttttgttaggattttcttattgtcaaaagcctaaggcatgtcctgaagggcgtttcaatgatgcttgtcggtatgatccttcacatcctacatgtgcctcatgttctatagggaccatgatgcggctgaatgctcgtagatacactactgtgatcatccctacatttatagatatcgcaaaacatttacacactttaaaaaagcgctaccctggatatcaaattctctttgcagttactgcttgtgaactttccttaaaaatgtttggagattatgcctccgtaatgaacttaaagggtgtgggcatcagactcacaggacgtatttgcaatacatttaaggcatttaaattagctgagcgaggagtcaaaccaggagtcactatcctagaagaagatggctttgaggtattagcaaggattcttacagaatacagtagcgctcctttccctagagacttttgtgagatccattag

SEQ ID NO: 199 - protein, 99 aa, Chlamydia pneumoniae
MKKVVTLSIIFFATYCASELSAVTVVAVPLSEAPGKIQVRPVVGLQFQEEQGSVPYSFYYPYDYGYYYPETYGYTKNTGQESRECYTRFEDGTIFYECD

SEQ ID NO: 200 - DNA, 300 bp, Chlamydia pneumoniae
atgaagaaagtcgtaacactatccattatatttttcgcaacgtattgtgcatcagagcttagtgctgtaactgtagtggctgtgcctttatcagaggctccagggaagattcaagttcgtcccgtcgttggtctgcaatttcaagaagaacagggttctgtgccctatagtttttattatccttatgactatgggtattactatccagagacttatggctatactaaaaatacaggtcaagaaagtcgcgaatgttatacccgatttgaagatggcacaattttttatgaatgcgattag

SEQ ID NO: 201 - protein, 362 aa, Chlamydia pneumoniae
VHYCERTLDPKYILKIALKLRQSLSLFFQNSQSLQRAYSTPYSYYRIILQKENKEKQALARHKCISILEFFKNLLFVHLLSLSKNQREGCSTDMAVVSTPFFNRNLWYRLLSSRFSLWKSYCPRFFLDYLEAFGLLSDFLDHQAVIKFFELETHFSYYPVSGFVAPHQYLSLLQDRYFPIASVMRTLDKDNFSLTPDLIHDLLGHVPWLLHPSFSEFFINMGRLFTKVIEKVQALPSKKQRIQTLQSNLIAIVRCFWFTVESGLIENHEGRKAYGAVLISSPQELGHAFIDNVRVLPLELDQIIRLPFNTSTPQETLFSIRHFDELVELTSKLEWMLDQGLLESIPLYNQEKYLSGFEVLCQ

SEQ ID NO: 202 - DNA, 1089 bp, Chlamydia pneumoniae
gtgcactactgcgagagaaccctggacccaaagtatattctgaagattgctctaaagctgagacaatcactttccctgttcttccagaacagccaatcactccaacgtgcatactcgaccccatattcctactaccgaatcattctacaaaaggaaaataaagagaagcaagctttagctcgacacaaatgcatttctattttagaatttttcaaaaacttactctttgttcatcttctgtcattatcaaagaatcaaagggaaggttgctccactgatatggctgttgtaagcactcccttttttaatcggaatttatggtatcgactcctttcctcacggttttctctatggaaaagctattgtccaagattttttcttgattacttagaagctttcggtctcctttctgatttcttagaccatcaagcagtcattaaattcttcgaattagaaacacatttttcctattatcccgtttcaggatttgtagctccccatcaatacttgtctctgttgcaggaccgttactttcccattgcctctgtaatgcgaactctcgataaagataatttctccttaactcctgatctcatccatgaccttttagggcacgtgccttggcttctacatccctcattttctgaatttttcataaacatgggaagactcttcactaaagtcatagaaaaagtacaagctcttcctagtaaaaaacaacgcatacaaaccctacaaagcaatctgatcgctattgtacgctgcttttggtttactgttgaaagcggacttattgaaaaccatgaaggaagaaaagcatatggagccgttcttatcagttctcctcaggaacttggacacgctttcattgataacgtacgtgttctccctttagaattggatcagattattcgtcttcccttcaatacatcaactccacaagagactttattttcaataagacattttgatgaactggtagaactcacttcaaaattagaatggatgctcgaccaaggtctgttagaatcaattcccctttacaatcaagagaaatatctttctggttttgaggtactttgccaatga

SEQ ID NO: 203 - protein, 210 aa, Chlamydia pneumoniae
MMNYEDAKLRGQAVAILYQIGAIKFGKHILASGEETPLYVDMRLVISSPEVLQTVATLIWRLRPSFNSSLLCGVPYTALTLATSISLKYNIPMVLRRKELQNVDPSDAIKVEGLFTPGQTCLVINDMVSSGKSIIETAVALEENGLVVREALVFLDRRKEACQPLGPQGIKVSSVFTVPTLIKALIAYGKLSSGDLTLANKISEILEIES

SEQ ID NO: 204 - DNA, 633 bp, Chlamydia pneumoniae
atgatgaactacgaagatgcaaaattacgcggtcaagctgtagcaattctataccaaatcggagctataaagttcggaaaacatattctcgctagcggagaagaaactcctctgtatgtagatatgcgtcttgtgatctcctctccagaagttctccagacagtggcaactcttatttggcgcctccgcccctcattcaatagtagcttactctgcggagtcccttatactgctctaaccctagcaacctcgatctctttaaaatataacatccctatggtattgcgaaggaaggaattacagaatgtagacccctcggacgctattaaagtagaagggttatttactccaggacaaacttgtttagtcatcaatgatatggtttcctcaggaaaatctataatagagacagcagtcgcactggaagaaaatggtctggtagttcgtgaagcattggtattcttagatcgtagaaaagaagcgtgtcaaccacttggtccacagggaataaaagtcagttcggtatttactgtacccactctgataaaagctttgatcgcttatgggaagctaagcagtggtgatctaaccctggcaaacaaaatttccgaaattctagaaattgaatcttaa

SEQ ID NO: 205 - protein, 67 aa, Chlamydia pneumoniae
MKKLIALIGIFLVPIKGNTNKEHDAHATVLKAARAKYNLFFVQDVFPVHEVIEPISPDCLVHYEGWV

SEQ ID NO: 206 - DNA, 204 bp, Chlamydia pneumoniae
atgaaaaaattgattgctttgatagggatatttcttgttccaataaaaggaaataccaataaggaacacgacgctcacgcgactgttttaaaagcggccagagcaaagtataatttgttctttgttcaggatgttttccctgtacacgaagttatcgagcctatttctcccgattgcctggtacattatgaagggtgggtttga

SEQ ID NO: 207 - protein, 183 aa, Chlamydia pneumoniae
LNFAKIDHNHLYLTCLGDLGVACPILSTDCLPNYSEKASHEVLVYSKFRCISGEPSRLATSGNDTYYSIVSLPIGLRYEVTSPSGRHDFNIDMHVAPKIGAVLSHGTREAKEIPGSSKDYAFFSLTARESLMISEKLAMTFQVSEVIQNCYSQCTKVTKTNLKEQYRHLSHNTGFELSVKSAF

SEQ ID NO: 208 - DNA, 552 bp, Chlamydia pneumoniae
ttgaattttgcaaagattgatcacaatcatctctaccttacatgtttgggagatcttggtgtagcttgtcctatactttctacagattgtctacctaattatagcgagaaagcatctcatgaggttcttgtttatagtaaatttagatgcatttctggagagccatctcgacttgcaacttcaggaaatgacacatattattctatagtaagtttacctataggactccgttacgaagtgacttcaccatcaggacgtcatgatttcaatattgatatgcatgtagctccaaagataggtgcagtactctctcatggaacacgagaggctaaagagatcccaggatcttcaaaagactatgcattttttagcttgactgctagagaaagtttaatgatttctgaaaagcttgcgatgactttccaagttagcgaagttattcagaattgttattcacaatgtactaaagtaacgaaaactaatttaaaagaacagtataggcacttatcccacaatacagggtttgagttaagcgtcaagtctgcattctaa

SEQ ID NO: 209 - protein, 261 aa, Chlamydia pneumoniae
MFLQFFHPIVFSDQSLSFLPYLGKSSGIIEKCSNIVEHYLHLGGDTSVIITGVSGATFLSVDHALPISKSEKIIKILSYILILPLILALFIKIVLRIILFFKYRGLILDVKKEDLKKTLTPDQENLSLPLPSPTTLKKIHALHILVRSGKTYNELIQEGFSFTKITDLGQAPSPKQDIGFSYNSLLPNFYFHSLVSVPNISGEERALNYHKEQQEEMAVKLKTMQACSFVFRSLHLPSMQTKDKKAGFGLLTFFPWKIYPL

SEQ ID NO: 210 - DNA, 786 bp, Chlamydia pneumoniae
atgtttcttcagttttttcatcctatagtcttctcggatcagtccttatcttttcttccttacctaggaaaaagctctggcattattgaaaaatgttccaatatcgttgaacactatttacatttgggaggagacacttctgttatcatcacaggagtttctggagctacctttctatctgttgatcatgccctcccaatctcgaaatctgaaaaaataataaaaattctctcctatattttaattcttcctctgattctagctctctttattaagatcgttttacgcattatcttattcttcaagtatcgtggtctaatcctagatgttaagaaggaggatttgaaaaaaacacttacacctgaccaagaaaacctcagtcttcctttaccatctcctacaacattaaagaaaattcatgcgctacacattttagtgcgttctggaaaaacctataacgagcttatacaagaagggttttctttcactaaaatcacagatcttggtcaagctccttcaccaaagcaagatattggcttctcttataattcccttctccctaacttctattttcattccttggtatctgttccaaatatttcaggcgaggaacgggctcttaattatcataaagaacaacaagaggaaatggctgttaaattaaaaacaatgcaagcgtgttcttttgtcttccgatccctgcatttaccttcaatgcaaacgaaggacaaaaaggctggatttggactactgacgtttttcccttggaaaatctaccccctataa

SEQ ID NO: 211 - protein, 93 aa, Chlamydia pneumoniae
MGNHETYIHPGVLPSSHAQDVSRSTVYPSRSFIMRRMLMGWNFNRVPSKSSEQLMDGHRIPLIFFGKHHPTISILNVNRFSWLSIFYNGERGF

SEQ ID NO: 212 - DNA, 282 bp, Chlamydia pneumoniae
atgggaaaccatgagacctatatacatccaggagtgctcccgagtagtcatgctcaggatgttagcagatctacagtttaccccagtcgaagttttatcatgagacgtatgctcatgggctggaatttcaatcgtgttccctcgaagagctccgagcagttaatggatggtcatcgcatacctcttatattttttgggaagcatcatcctactatatctattttaaatgtcaatagattttcttggctctccattttttacaatggagaaagggggttttga

SEQ ID NO: 213 - protein, 111 aa, Chlamydia pneumoniae
MSESINRSIHLEASTPFFIKLTNLCESRLVKITSLVISLLALVGAGVTLVVLFVAGILPLLPVLILEIILITVLVLLFCLVLEPYLIEKPSKIKELPKVDELSVVETDSTL

SEQ ID NO: 214 - DNA, 336 bp, Chlamydia pneumoniae
atgtctgaaagtattaacagaagcattcatttagaagcctctacaccattttttataaaattaacgaatctctgtgaaagtagattagttaagatcacttctcttgttatttctctattagctttagtgggtgcgggagtcactcttgtggttttatttgtagctgggatccttcctttacttcctgtactcatcttagaaattattttaataaccgtccttgtcttgcttttttgtttggtattggaaccttatttaatagaaaaacctagtaaaataaaggaactacctaaagtagacgagctatctgtagtagaaacggacagtactctttaa

SEQ ID NO: 215 - protein, 59 aa, Chlamydia pneumoniae
MRVMRFFCLFFLGFLGSFHCVAEDKGVDLFGVWDDNQITECDDSYMTEGREEVEKVVDA

SEQ ID NO: 216 - DNA, 180 bp, Chlamydia pneumoniae
gtgagagttatgagatttttttgtctattttttcttgggttcctaggatcttttcattgtgttgctgaagacaagggcgtggatttatttggagtctgggacgataaccaaattacagagtgtgacgatagttacatgacagagggtcgtgaagaggttgaaaaggtagtggacgcttag

SEQ ID NO: 217 - protein, 344 aa, Chlamydia pneumoniae
MENAMSSSFVYNGPSWILKTSVAQEVFKKHGKGIQVLLSTSVMLFIGLGVCAFIFPQYLIVFVLTIALLMLAISLVLFLLIRSVRSSMVDRLWCSEKGYALHQHENGPFLDVKRVQQILLRSPYIKVRALWPSGDIPEDPSQAAVLLLSPWTFFSSVDVEALLPSPQEKEGKYIDPVLPKLSRIERVSLLVFLSAFTLDDLNEQGVNPLMNNEEFLFFINKKAREHGIQDLKHEIMSSLEKTGVPLDPSMSFQVSQAMFSVYRYLRQRDLTTSELRCFHLLSCFKGDVVHCLASFENPKDLADSDFLEACKNVEWGEFISACEKALLKNPQGISIKDLKQFLVR

SEQ ID NO: 218 - DNA, 1035 bp, Chlamydia pneumoniae
atggagaatgctatgtcatcatcgtttgtgtataatgggccttcgtggattttaaaaacgtcagtagctcaggaggtatttaaaaagcacggtaaggggattcaggttctcttaagtacttcagtgatgctttttataggtcttggagtctgtgcctttatatttcctcaatatctgattgtttttgttttgactatagctttgcttatgctcgctataagcttggtattgtttctcttaatacgttctgtacgctcttcaatggtagatcgtttgtggtgttctgaaaaaggatatgctcttcatcaacatgagaacgggccttttttggatgtgaagcgtgtacagcaaattcttctaagatcaccctatattaaagttcgggctttatggccgtctggagatatccctgaggatccttcacaagctgcggttctattactttctccttggactttcttttcatccgtggatgtagaggctttattaccgagtcctcaagaaaaggagggtaagtatatagatcctgtgctgcctaagttgtctaggatagagagagtctcacttttagtgtttttgagtgcatttactttggatgacttaaacgaacagggagtcaatcctttgatgaataatgaggaatttttattttttataaataagaaagcgcgtgagcatgggattcaggatttaaaacacgagattatgtcttcgttagagaaaacaggagtgccattagacccctcaatgagttttcaagtttcacaagcgatgttttctgtatatcgctacttgagacaaagggatttaacgacttcagaattaagatgttttcacctcttaagttgttttaaaggggatgtggttcattgtttagcttcatttgaaaaccctaaagatttagcagattctgactttttagaagcttgtaagaacgtggaatggggtgagtttatttcggcatgtgagaaggctcttttaaagaatccgcaaggaatttccattaaggatctaaaacaatttttagtgaggtaa

SEQ ID NO: 219 - protein, 325 aa, Chlamydia pneumoniae
MIEFAFVPHTSVTADRIEDRMACRMNKLSTLAITSLCVLISSVCIMIGILCISGTVGTYAFVVGIIFSVLALVACVFFLYFFYFSSEEFKCASSQEFRFLPIPAVVSALRSYEYISQDAINDVIKDTMQLSTLSSLLDPEAFFLEFPYFNSLIVNHSMKEADRLSREAFLILLGEITWKDCETKILPWLKDPNITPDDFWKLLKDHFDLKDFKKRIATWIRKAYPEIRLPKKHCLDKSIYKGCCKFLLLSENDVQYQRLLHKVCYFSGEFPAMVLGLGSEVPMVLGLPKVPKDLTWEMFMENMPVLLQSKREGHWKISLEDVASL

SEQ ID NO: 220 - DNA, 978 bp, Chlamydia pneumoniae
atgatcgagtttgcttttgttcctcatacctccgtgacagcggatcggattgaggatcgcatggcctgtcgcatgaacaagttgtctactttagcaattacaagtctttgtgtattgatcagttcagtttgtattatgattgggattttatgcatttctggaacggttgggacctatgcatttgttgtaggaattattttttctgtgcttgctttggtagcatgtgttttctttctttatttcttttatttttcttctgaggaatttaagtgtgcttcttcgcaggagtttcgttttttgcctataccagctgtggtttctgcattgcgttcctatgaatacatttctcaggacgctatcaatgacgttataaaagatacgatgcagttgtctaccctttcttctcttttagatcccgaagcttttttcttagaatttccttattttaactctttgatagtgaatcattcgatgaaggaagcggatcgtttgtctcgagaggcttttttgattttattaggtgagattacttggaaggattgtgaaacaaaaattttgccatggttgaaagatcctaatatcactcctgatgatttctggaagctattaaaagaccatttcgatttaaaggactttaagaagaggatcgccacttggatacggaaggcctatccagaaattagattaccgaagaagcattgtttagataagtctatctataaggggtgttgtaagtttttattactttctgagaatgatgtgcaatatcagaggttattacataaggtctgttatttctctggggagtttcctgccatggttttaggtttgggaagtgaagtgcctatggtgttaggactccctaaggttcccaaggatcttacctgggagatgtttatggaaaatatgcctgttcttctgcaaagcaaaagagaggggcattggaaaatctccttggaagacgtagcctctctttaa

SEQ ID NO: 221 - protein, 374 aa, Chlamydia pneumoniae
MNTSLKRPLKSHFDVVGSFLRPEHLKKTRESLKEGSISLDQLMQIEDIAIQDLIKKQKAAGLSFITDGEFRRATWHYDFMWGFHGVGHHRATEGVFFDGERAMIDDTYLTDKISVSHHPFVDHFKFVKALEDEFTTAKQTLPAPAQFLKQMIFPNNIEVTRKFYPTNQELIEDIVAGYRKVIRDLYDAGCRYLQLDDCTRGGLVDPRVCSWYGIDEKGLQDLIQQYLLINNLVIADRPDDLVVNLHVCRGNYHSKFFASGSYDFIAKPLFEQTNVDGYYLEFDHERSGDFSPLTFISGEKTVCLGLVTSKTPTLENKDEVIARIHQAADYLPLERLSLSPQCGFASCEIGNKLTEEEQWAKVALVKEISEEVWK

SEQ ID NO: 222 - DNA, 1125 bp, Chlamydia pneumoniae
atgaatacttcactaaaaagacctctgaaatctcattttgatgttgtcggtagttttttgcgtcctgagcatttaaaaaaaactagagaaagccttaaagaaggctctatttctctagatcaactcatgcaaattgaggatatcgctatccaagatttgatcaaaaaacaaaaagcagcaggtctttcttttattactgatggagaattccgcagagctacgtggcattacgacttcatgtggggttttcatggcgtaggtcaccacagagctacagaaggagttttctttgatggagaacgcgctatgatcgatgatacctatctgacagacaagatctctgtatctcaccacccatttgtggatcactttaaatttgtaaaagctctagaagatgaatttacgactgcaaagcaaactcttcctgcaccggcacagtttttaaagcagatgatcttccctaataatatagaggtcacacgtaaattctatcctacaaatcaggagctaattgaagatattgttgcaggttatcgtaaagtcattcgcgatctttatgatgctggctgccgctatctccaattagatgactgtactcggggaggtttagtagaccctcgagtctgttcgtggtatggtatcgatgaaaaaggtcttcaagatctgattcaacaatatcttctgattaataatcttgtaattgcagatcgtcccgatgatctagtcgttaatttacatgtatgccgtgggaactaccactcaaaattctttgctagtggtagttatgactttattgcaaagcccctattcgaacaaacaaatgtagacggctactatttagagtttgatcatgagcgttctggagacttctctcctctcaccttcatttctggagaaaaaactgtctgcttaggtcttgttaccagcaaaacccctacacttgaaaataaggatgaggtcattgctcgcatacatcaagcagcagactacctgcccttggaaagactctctctaagtccacagtgtggttttgcttcatgtgaaataggaaataaattaacagaagaagagcaatgggctaaagttgctctagtaaaagaaatttccgaagaagtttggaaataa

SEQ ID NO: 223 - protein, 342 aa, Chlamydia pneumoniae
MKLYSISSDVDTPWIFQLMSKVDSYLFLGGNRIKVVSIVMQEPNLIIGKVENVRISTIVKILKILSFLIFPLILIALALHYFLHAKYANHLLVSKILERAPQYVPIPGRSGDTASHYKLTTLVPVSQKNLQAMGSNPLEVEAALRTTKPSFFCVPAKYRQIIISSHGIRFSLDLEQLADDINLDSVSWPTEYLNSTMDFCSKADKRVIQNVQNLRTGTYINSVGKRSLLKFMLQHLFIDGITQENPEALPNNTSGRLTLFPSVRYIYSHFTPQNPTIWPQVFFRQGPLDEDRGGGFEILEQLQELGVRFPICPSQGPDNPNFQGFQGIRIYWEDSYQPNKEV

SEQ ID NO: 224 - DNA, 1029 bp, Chlamydia pneumoniae
atgaaactttatagcatctcttcagatgtagatacaccttggatatttcagcttatgtcaaaggtagattcttatcttttcttaggcgggaatagaatcaaggttgtatctatagttatgcaagaacctaacttaattattggaaaagtagaaaacgttcggatctccacaatagtgaaaatattaaagattttatccttcttaatcttccctctgattttaatcgctttagccctacactattttctacatgctaaatatgctaatcacttacttgtatctaagattttagaaagagctcctcagtatgtgcctattcctggtcgttcaggagacacggcgtctcattataaattaacaacattggttccagtatcccaaaaaaatctacaagctatgggatcaaatcctctagaagttgaagcggctcttcgaactacaaaaccctcttttttctgtgtacctgcaaaataccgtcagattataatttcaagtcacggcattcgcttttctttagatcttgaacaacttgctgatgacattaatttagattcggtttcctggcctacggagtatcttaactctactatggatttttgcagcaaggcagataaacgtgttatacagaatgtacaaaatctgcggacaggaacttacataaattctgtaggaaagcgtagccttttaaaattcatgttacagcacctatttattgatgggatcacacaagaaaaccctgaagcccttcctaacaatacatctggaagactgactctattccctagtgttcgttatatctattctcattttactccacaaaatcctacaatatggccgcaagtctttttcagacaaggtcctctagatgaagatcgaggaggaggatttgagatcttagagcaattacaagagttaggagttaggtttccaatttgcccctctcaaggaccagacaatcctaattttcaaggttttcaagggattcgtatctattgggaagattcctatcaacccaataaggaggtttaa

SEQ ID NO: 225 - protein, 334 aa, Chlamydia pneumoniae
MSYDTLFKNLEKEDSVHKICNEIFALVPRLNTIACTEAIIKNLPKADIHVHLPGTITPQLAWILGVKNGFLKWSYNSWTNHRLLSPKNPHKQYSNIFRNFQDICHEKDPDLSVLQYNILNYDFNSFDRVMATVQGHRFPPGGIQNEEDLLLIFNNYLQQCLDDTIVYTEVQQNIRLAHVLYPSLPEKHARMKFYQILYRASQTFSKHGITLRFLNCFNKTFAPQINTQEPAQEAVQWLQEVDSTFPGLFVGIQSAGSESAPGACPKRLASGYRNAYDSGFGCEAHAGEGIETRTIFSSAKVNPEGLIEITRVTFSSLKRKQPSSLPIRVTCQLG

SEQ ID NO: 226 - DNA, 1005 bp, Chlamydia pneumoniae
atgtcttatgatacgttattcaagaatcttgaaaaggaagattctgtacataagatatgcaatgagatctttgcattagtaccacgactcaatacaatcgcttgcaccgaagctatcatcaaaaacctccccaaagcagatatccatgtacaccttcctgggaccataacacctcaattagcttggattttaggtgtgaaaaatgggttcttaaaatggtcttataattcttggaccaatcatcgattactttctcctaagaatcctcataaacaatactccaatattttccgaaactttcaagatatctgtcacgaaaaggatccggatttaagtgtattacaatataatatcttaaattacgattttaatagctttgatagagtgatggctacagtacaaggacatcgctttcctcctggaggaatccaaaatgaagaagaccttcttctcattttcaataactatctccagcaatgtctggacgatactatcgtgtatactgaagtacaacaaaatatccgccttgcccatgttttgtatccttcattacctgaaaagcacgcgcgtatgaagttttatcaaatcttgtatcgtgcttcgcaaacgttttcaaaacacgggattactttacgatttttaaactgcttcaataaaacatttgctccacaaataaacacacaagaacctgcccaagaagctgttcaatggctccaagaggttgattctacatttcctggtctatttgtagggatacaatccgcaggatcagaatctgcgcccggagcctgtcctaagcgattagcttctggatatagaaatgcttatgactcagggtttggttgtgaagctcatgctggagaaggcatagagacccggactattttttcgtcagctaaggtaaatccagagggattgatcgagataacccgagtgactttctcgtctcttaaacgaaaacagccatctagtttacccataagagttacttgccagttaggataa

SEQ ID NO: 227 - protein, 429 aa, Chlamydia pneumoniae
LQSARRHLNTIFILDFGSQYTYVLAKQVRKLFVYCEVLPWNISVQCLKERAPLGIILSGGPHSVYENKAPHLDPEIYKLGIPILAICYGMQLMARDFGGTVSPGVGEFGYTPIHLYPCELFKHIVDCESLDTEIRMSHRDHVTTIPEGFNVIASTSQCSISGIENTKQRLYGLQFHPEVSDSTPTGNKILETFVQEICSAPTLWNPLYIQQDLVSKIQDTVIEVFDEVAQSLDVQWLAQGTIYSDVIESSRSGHASEVIKSHHNVGGLPKNLKLKLVEPLRYLFKDEVRILGEALGLSSYLLDRHPFPGPGLTIRVIGEILPEYLAILRRADLIFIEELRKAKLYDKISQAFALFLPIKSVSVKGDCRSYGYTIALRAVESTDFMTGRWAYLPCDVLSSCSSRIINEIPEVSRVVYDISDKPPATIEWE

SEQ ID NO: 228 - DNA, 1290 bp, Chlamydia pneumoniae
ttgcagagtgcaaggagacatttgaacaccatatttattctagattttggatctcaatatacttatgtattagcaaagcaagtgcggaagttatttgtatattgcgaagttcttccctggaatatctctgtgcaatgtttaaaagaaagagcgcctttggggatcattctctcaggaggtcctcactctgtctatgaaaacaaggctccacatttagatcctgaaatctataaacttggcattccaattctagctatttgctatggcatgcagcttatggctagagattttggagggactgtaagccctggtgtaggagaatttggatatacgcccatccatctgtatccttgtgagctcttcaaacacatcgtcgactgcgaatctctagacacagagattcggatgagccatcgggatcatgttacgacaattcctgaaggatttaatgtaatcgcatccacctcacaatgctcgatctcaggaatagaaaataccaaacaacggttgtacgggctgcaatttcatcccgaggtttctgactccactccaacgggaaataagattctagaaacttttgttcaagagatctgttctgctcccacactatggaatcccttgtatattcagcaagaccttgtaagtaaaattcaagataccgttattgaagtatttgatgaagtcgctcagtcattagacgtacaatggttagctcaaggaaccatctactcagatgttattgagtcctcacgctctggacatgcctccgaagtaataaaatcacatcataatgtaggggggcttccaaaaaatcttaagctgaagttagtcgagcccttacgttatttatttaaagatgaagttcgaattttaggagaagccctaggactttctagctatctcttggacaggcatccttttcctggacctggcttgacaattcgtgtgattggagagatccttcctgaatatctagccattttacgacgggcggacctcatctttatagaagagcttaggaaagcaaaactctacgataaaataagccaagcctttgctctatttcttcctataaaatcagtatctgtaaaaggagattgtagaagctatggttataccatagcattacgtgctgtagaatctacagatttcatgacaggacgatgggcctaccttccatgcgatgttctcagttcttgctcatcgcgaattattaatgaaatacccgaggtaagccgagtggtctatgatatttctgacaagccaccagcaactatagaatgggaatag

SEQ ID NO: 229 - protein, 265 aa, Chlamydia pneumoniae
MNTYTFSPTLQKSFSLFLLEKLDSYFFFGGTRTQILVITPTNIRLAAKKRGCKVSTIEKIIKILSFILLPLVIIAFILRYFLHKKFDKQFLCIPKVISNEDEALLGSRPQAVEKAVREISPAFFSIPRKYQLIRIDTPKDDAPSILFPIGIEIILKDLCIDTLKQSNLFLKREMDFLGHPEEKALFDSICSIEKDQEWMSLESKKLLITHFLKYLFVSGIEQLNPGFNPENGRGYFSEISTAKIHFHQHGRYGPIRSSGPIMKEI

SEQ ID NO: 230 - DNA, 798 bp, Chlamydia pneumoniae
atgaatacctataccttctctcctacacttcagaaaagcttcagcctatttcttttagaaaaattagactcttactttttctttggagggactcgtacacaaatcttagtcatcacaccaaccaatattagattagcagctaaaaaaagagggtgtaaggtttctactatagaaaagataatcaagatcctctcttttatcctgctgcccctagttatcattgcctttatacttcgctatttcttacataagaaattcgataaacagttcttgtgtatcccaaaagtcatttctaacgaagacgaagctcttcttggatctagaccacaagcagttgaaaaagcagttcgagaaatatctccagccttcttctctataccaagaaaataccaacttattagaatcgacactcctaaagatgacgctccctcaatccttttccctataggcatagagatcattctcaaagatttatgtattgatacactcaagcaatctaatcttttccttaaaagagaaatggatttcttaggtcatccagaagaaaaagcattattcgactcgatatgttctatagaaaaagatcaagaatggatgagcttggaaagtaaaaaacttttaatcacgcacttcctaaagtatctctttgtctctggaatcgaacaactaaatccaggctttaacccagagaatgggcgtgggtatttttcagaaataagtacagcaaagatccattttcatcagcacggtcgatatgggccaatccgttcttcgggacccatcatgaaggaaatataa

SEQ ID NO: 231 - protein, 315 aa, Chlamydia pneumoniae
MLVELEALKREFAHLKDQKPTSDQEITSLYQCLDHLEFVLLGLGQDKFLKATEDEDVLFESQKAIDAWNALLTKARDVLGLGDIGAIYQTIEFLGAYLSKVNRRAFCIASEIHFLKTAIRDLNAYYLLDFRWPLCKIEEFVDWGNDCVEIAKRKLCTFEKETKELNESLLREEHAMEKCSIQDLQRKLSDIIIELHDVSLFCFSKTPSQEEYQKDCLYQSRLRYLLLLYEYTLLCKTSTDFQEQARAKEEFIREKFSLLELEKGIKQTKELEFAIAKSKLERGCLVMRKYEAAAKHSLDSMFEEETVKSPRKDTE

SEQ ID NO: 232 - DNA, 948 bp, Chlamydia pneumoniae
atgctagtagagttagaggctcttaaaagagagtttgcgcatttaaaagaccagaagccgacaagtgaccaagagatcacttcactttatcaatgtttggatcatcttgaattcgttttactcgggctgggccaggacaaatttttaaaggctacggaagatgaagatgtgctttttgagtctcaaaaagcaatcgatgcgtggaatgctttattgacaaaagccagagatgttttaggtcttggggacataggtgctatctatcagactatagaattcttgggtgcctatttatcaaaagtgaatcggagggctttttgtattgcttcggagatacattttctaaaaacagcaatccgagatttgaatgcatattacctgttagattttagatggcctctttgcaagatagaagagtttgtggattgggggaatgattgtgttgaaatagcaaagaggaagctatgcacttttgaaaaagaaaccaaggagctcaatgagagccttcttagagaggagcatgcgatggagaaatgctcgattcaagatctgcaaaggaaacttagcgacattattattgaattgcatgatgtttctcttttttgtttttctaagactcccagtcaagaggagtatcaaaaggattgtttgtatcaatcacgattgaggtacttattgttgctgtatgagtatacattgttatgtaagacatccacagattttcaagagcaggctagggctaaagaggagttcattagggagaaattcagccttctagagctcgaaaagggaataaaacaaactaaagagcttgagtttgcaattgctaaaagtaagttagaacggggctgtttagttatgaggaagtatgaagctgccgctaaacatagtttagattctatgttcgaagaagaaactgtgaagtcgccgcggaaagacacagaataa

SEQ ID NO: 233 - protein, 404 aa, Chlamydia pneumoniae
VVVVALFILGIFFLSGSLAFLVHTSCGVLLGAALPILCIGLVLLAVALIVFLCHKHKTRQDLDYYDQDLDSLVIHKKEIPNDISELRVTFEKLQNLFQFHTKDFSDLSQELQGKFINCMEKWLTLEDEVTKFLIVRDRFLETRRNFTTFGEQVKGIQSNIFDLHEEKSSLYLELYRLRKDLQVLLNFFLLPPGILKVDYDEIEAIKGLFIRLTSRLDKLDVKAQERKKFINEMSREFKEVEKAFDIVDRATKKLMDRAKKESPARLFMGRTESLLEMKKNEEALKNQGLDPENLSHPELFSPYQQLLILNYLNSEIVLHHYEFLISGTVTSGLTLEECENRMRAASTGLNALLVRKLQFRGAIKSAYFEKLTEIEKELRSLQDVIKSLELELIHKIKDIVTEET

SEQ ID NO: 234 - DNA, 1215 bp, Chlamydia pneumoniae
gtggtggttgtcgctttatttatccttgggattttctttttatctggttctcttgcattccttgttcatacgtcttgcggagttcttttaggagcggcgcttcccatactttgcataggtcttgttttattggctgtagctcttattgttttcttatgtcacaaacacaagactcgtcaagatttagattattatgatcaagatttagattctttggtgattcataagaaagagatccccaatgacatctctgagttgcgggtaacatttgaaaagttgcaaaatctgtttcagttccatacgaaagatttctctgatctaagccaagagcttcagggtaaatttatcaattgcatggagaaatggctaactttagaagacgaagtgactaaatttcttattgttcgagatagatttttagaaaccagaagaaattttaccacttttggagaacaggttaaagggatccaaagcaatatttttgatttgcatgaggaaaagtcttcattatatttagaattgtataggcttaggaaagacctccaagttctattaaatttttttctgctccccccaggtatactcaaggtagattatgatgaaattgaggctatcaaaggtctgtttataagattaacctctagattagataagcttgatgtgaaagctcaggaacgtaagaagttcattaatgaaatgagtagggaatttaaagaagtagagaaagcttttgatattgtcgatagggcaacaaaaaagcttatggatagagccaagaaagaaagtccggcacgtcttttcatgggtagaactgagtctctcttagaaatgaaaaaaaatgaagaagcccttaaaaatcaggggctagatcctgaaaatctttcccatcctgaactttttagtccgtatcaacagcttttaattttgaattatttaaatagcgaaatagttctgcatcattatgagttccttatttctggaacagtaacttctggcctaactcttgaagaatgtgaaaatcgaatgagggcggcttctactgggttgaacgcccttctggtgcgtaagctccagttcagaggtgctataaaatctgcgtattttgaaaaactcacagagattgaaaaagagttacgatcacttcaagacgtaataaagtcattggaactagaactgatccataagataaaagatatagtgacagaagaaacttag

SEQ ID NO: 235 - protein, 500 aa, Chlamydia pneumoniae
MSPFKKIVNRLLCYISFQKESRTLPIIIREPRMTTKSLGSFNSVISKNKIHFISLGCSRNLVDSEVMLGILLKAGYESTNEIEDADYLILNTCAFLKSARDEAKDYLDHLIDVKKENAKIIVTGCMTSNHKDELKPWMSHIHYLLGSGDVENILSAIESRESGEKISAKSYIEMGEVPRQLSTPKHYAYLKVAEGCRKRCAFCIIPSIKGKLRSKPLDQILKEFRILVNKSVKEIILIAQDLGDYGKDLSTDRSSQLESLLHELLKEPGDYWLRMLYLYPDEVSDGIIDLMQSNPKLLPYVDIPLQHINDRILKQMRRTTSREQILGFLEKLRAKVPQVYIRSSVIVGFPGETQEEFQELADFIGEGWIDNLGIFLYSQEANTPAAELPDQIPEKVKESRLKILSQIQKRNVDKHNQKLIGEKIEAVIDNYHPETNLLLTARFYGQAPEVDPCIIVNEAKLVSHFGERCFIEITGTAGYDLVGRVVKKSQNQALLKTSKA

SEQ ID NO: 236 - DNA, 1503 bp, Chlamydia pneumoniae
atgagtccttttaagaaaatagtaaatcgcttactatgctatatttcttttcaaaaagaatcaagaactctcccaatcattattagagaacctaggatgacaacaaaaagtttaggatctttcaattcagttatttccaaaaataaaattcattttattagtttgggatgctctcggaaccttgtagatagcgaagtcatgctaggcattcttcttaaggcaggttacgagtctactaatgaaattgaagatgctgactatttaattttaaatacctgtgcgtttttaaaaagtgctagagatgaagctaaagattatctagaccatctaattgatgtaaaaaaagagaacgctaaaattattgtaactggatgcatgacttccaaccacaaagatgagcttaaaccctggatgtcacacatccattacctactaggttctggggatgttgagaatattctttctgctattgagtctcgtgaatctggagaaaaaatctctgcaaagagttacattgagatgggagaagttccaagacagctttccacaccaaaacactatgcctatttaaaagttgctgagggctgtagaaaacgttgtgctttttgtattattccttccattaaaggaaagctccgcagcaaacctctggatcaaattcttaaagaattccgcatccttgtaaacaagagtgtgaaagagattatattgatagctcaagacctaggagattatggaaaggatctctctacagaccgcagttcgcagctagaatcactattacatgagttactgaaagagcctggtgattattggctgcggatgttgtatttatatcctgatgaagtgagtgatggcattatagatcttatgcaatctaatcccaaacttcttccctatgtagatattcccttacagcacattaacgaccgtattttaaagcaaatgcgaagaacgacttctagggagcaaatcctaggattcctagaaaaattacgtgccaaggttcctcaggtctatatccgttcttctgttattgtgggtttccccggtgaaactcaggaagaattccaggagttagctgattttattggtgagggttggattgataatctcggaattttcttgtactctcaagaagcgaataccccggcagcagaactccctgaccagataccagaaaaagttaaagaatcgaggttgaaaattctatctcaaattcagaaacgcaatgtggataaacataatcagaagctcattggggaaaaaatagaagcagttattgataactatcatcctgaaacgaatcttttactcactgcaaggttctatggacaagctcctgaagtggacccttgtattattgtaaatgaggcgaagcttgtttctcattttggagaaagatgctttatagaaatcacagggactgctggttacgaccttgtagggcgtgttgtaaaaaaatctcagaaccaagctttgctaaaaactagcaaagcttag

SEQ ID NO: 237 - protein, 279 aa, Chlamydia pneumoniae
MKNNINNNECYFKLDSTVDGDLLAANLKTFDTQAQGISSTETFSVQGNATFKDQVSATGLTSGTTYNLNAQNFTSSQISIDFKNNRLSNCALPKEDCDPVPANYVRSPEYFFCSKPLIGDFDFNSGESYLPLTGSEYTLYQSRNVNSIFRFIGWKQSTRELTVGGNTAIQFLAAGTYIVSFTVGKRWGWNNGWGGAIYINNGLGQVQCESTIYSGGGYATIGTLGTSIYRASVDVAPNPNDPNASDRYRAGIFYLSNGGSSAGIGNYSFSLLYYPDDRG

SEQ ID NO: 238 - DNA, 840 bp, Chlamydia pneumoniae
atgaaaaacaatattaataataatgagtgctattttaaattagactcaactgtagatggtgatttgttagcagccaatctcaagacctttgatacacaggcccaaggaatctcatcgactgaaacattttctgttcaggggaatgcaacatttaaagatcaagtttcagcaactggattaacttcaggaactacttataatttaaatgcacaaaactttacttcctcccaaatctctatagattttaaaaataatcgtctgagtaattgtgcattgccaaaagaagactgcgatccggtgccagcgaattatgttcgttctcccgaatattttttctgttccaagcctctgatcggagattttgattttaactcaggggaatcttatttgcctctgactggttcggaatatactctatatcagtcacgtaatgtaaatagtatatttcgttttataggatggaagcaaagtacacgagaattaactgtagggggaaatactgcgatacaatttcttgcagcaggaacctatatcgtttcatttactgttggtaaacggtggggatggaataatggttggggaggagccatttatatcaataatggtttaggacaagtccaatgtgaaagcacgatttatagtggtggagggtatgcaacaataggtacactggggacctcaatatatagagcctctgtagatgtagctcctaatcctaatgatccgaatgcttcggatcgctatagagcgggtattttctatctcagtaacggtggttctagtgcaggtatagggaattactccttttctcttctctattatccggacgatagagggtag

SEQ ID NO: 239 - protein, 419 aa, Chlamydia pneumoniae
MKCSPLTLVPHIFLKNDCECHRSCSLKIRTIARLILGLVLALVSALSFVFLAAPISYAIGGTLALAAIVILIITLVVALLAKSKVLPIPNELQKIIYNRYPKEVFYFVKTHSLTVNELKIFINCWKSGTDLPPNLHKKAEAFGIDILKSIDLTLFPEFEEILLQNCPLYWLSHFIDKTESVAGEIGLNKTQKVYGLLGPLAFHKGYTTIFHSYTRPLLTLISESQYKFLYSKASKNQWDSPSVKKTCEEIFKELPHNMIFRKDVQGISQFLFLFFSHGITWEQAQMIQLINPDNWKMLCQFDKAGGHCSMATFGGFLNTETNMFDPVSSNYEPTVNFMTWKELKVLLEKVKESPMHPASALVQKICVNTTHHQNLLKRWQFVRNTSSQWTSSLPQYAFHAQTYKLEKKIESSLPIRSSL

SEQ ID NO: 240 - DNA, 1260 bp, Chlamydia pneumoniae
atgaagtgtagtcctttaacactagttccccatatatttttaaaaaatgactgcgaatgtcatagatcttgttctttaaaaattaggacaattgcccgactcattcttgggcttgttctagctcttgttagcgcactttcttttgttttccttgctgcgccgattagctatgctattggaggaactttagctttagccgctatcgtaatcttgattataacgctagtcgtagcactgctagctaaatcaaaggttctgcccatccccaacgaacttcagaagattatttacaatcgctatcctaaagaagtcttttatttcgtgaaaacacactccctgactgttaacgaattaaaaatatttattaattgctggaaaagcggtacagacctgcctccgaatttacataaaaaagcagaggctttcgggatcgatattctaaaatctatagatttaaccctgtttccagagttcgaagagattcttcttcaaaactgcccgttatactggctctcccattttatagacaaaactgaatctgttgctggggaaatcggattaaataaaacacaaaaagtttatggtttacttgggcccttagcgtttcataaaggatatacaactattttccactcttatacacgccctctactaacattaatctcagaatcacagtataagttcctatatagtaaagcgtctaagaatcaatgggattctccttctgtgaaaaaaacctgcgaagaaatattcaaggaactcccccacaatatgattttccggaaggatgttcaaggaatctcacaattcttatttcttttcttttctcatggtatcacttgggaacaggctcagatgattcaacttataaatcctgataattggaaaatgttgtgtcagtttgataaagcaggaggccactgttccatggcaacatttggaggctttttgaatactgaaacaaatatgttcgatccagtatcctctaactatgaacctacagtgaacttcatgacgtggaaagaattgaaggttttactagagaaagtaaaagaaagtcctatgcacccagcgagtgctcttgttcagaagatatgcgtaaatacaacgcaccatcaaaatctgttaaaacgatggcaatttgttcgtaatacgagttcacaatggacatcaagcttacctcagtatgctttccacgcccaaacctacaaactagagaaaaaaatagaaagcagtctccctatacgatcttccctataa

SEQ ID NO: 241 - protein, 447 aa, Chlamydia pneumoniae
MSNITSPVIQNNRSCNYYFELKNSTTIHIVISAILLCGALIAFLCVAAPVSYILSGALLGLGLLIALIGVILGIKKITPMISSKEQVFPQELVNRIRAHYPKFVSDFVSEAKPNLKDLISFIDLLNQLHSEVGSSTNYNVSEELQQKIDTFEGIARLKNEVRTASLKRLESAASSRPLFPSLPKILQKVFPFFWLGEFISAGSKVVELHRVKKIGGSLEEDLSDYIKPEMLPTYWLIPLDFRPTNSSILNLHTLVLARVLTRDVFQHLKYAALNGEWNLNHSDLNTMKQQLFAKYHAAYQSYKHLSQPSLQEDEFYNLLLCIFKHRYSWKQMSLIKTVPADLWENLCCLTLDHTGRPQDMEFASLIGTLYTQGLIHKESEAFLSSLTLLSLDQFKTIRRQSTNIAMFLENLATHNSTFRSLPPITVHPLKRSVFSQPEEDESSLLIG

SEQ ID NO: 242 - DNA, 1344 bp, Chlamydia pneumoniae
atgagtaatataacctcgccagttattcaaaataatcgctcttgtaattattattttgaattaaagaattcaaccactattcatattgttatcagtgccatcttactctgcggagctttgatagctttcttgtgtgtagcagctcctgtttcctatattctaagtggcgcattgttaggattaggattattaatagccttgattggtgtgattttaggaataaaaaaaatcacgcctatgatttcatcaaaagaacaagtattcccccaagaactcgtaaatagaatcagggcgcactatcctaaatttgtctctgattttgtttcagaagctaaaccaaatcttaaagatctcataagttttattgatcttctaaatcaattgcactctgaagttggatcatctacaaattacaacgtatctgaagaactacaacagaaaatagatacgttcgagggtatcgcacgcttaaaaaatgaagtccgtactgcttctcttaaaagacttgaaagcgctgcttcttcccgtcccctcttcccctctttaccaaaaatcttacaaaaggtatttccatttttctggttaggagagtttatttctgcaggcagcaaggttgtagagctccatcgagttaagaaaattggaggcagcctcgaagaagaccttagtgattatataaaaccagagatgcttcctacctattggttgattcctttagattttagaccaacaaattcctctattctaaatctacacacattagttttagctagagtcttaactcgtgatgtttttcaacatcttaagtatgcagcattaaatggcgagtggaacctgaatcatagtgatctaaatactatgaaacagcagctctttgctaaatatcatgcggcgtatcaatcctataaacatctatctcaaccctctcttcaagaggatgaattctataacctgctcttgtgtatttttaagcataggtactcgtggaagcagatgtccttaataaaaacagtcccggctgatttatgggaaaacctctgttgcttgactttagaccatacaggacgaccccaagacatggaatttgcctctctaattggtactctctacacacaaggcctaattcataaagaaagcgaagcatttctttcttcattgacactccttagtttagatcagtttaaaacgatccgtcgtcagtcaaccaatatagcgatgttccttgagaatttagcaactcataattccacctttagaagcttaccacctataacagtccatccactcaagagaagcgtcttctcccaacctgaagaagacgagtcctccctgctgataggttag

SEQ ID NO: 243 - protein, 371 aa, Chlamydia pneumoniae
MEMMSPFQQPEQCHFDVVGSFLRPESLTRARSDFEEGRIVYEQMRVVEDAAIRNLIKKQTEAGLIFFTDGEFRRYSWDFDFMWGFHGVDRRRDSNDPEIGVYLKDKISVSKHPFIEHFEFVKTFEKGNAKAKQTIPSPSQFFHEMIFAPNLKNTRKFYPTNQELIDDIVFYYRQVIQDLYAAGCRNLQLDDCAWCRLLDIRAPSWYGVDSHDRLQEILEQFLWIHNLVMKDRPEDLFVSLHVCRGDYQAEFFSRRAYDSIEEPLFAKTDVDSYHYYWALDDKYSGGAEPLAYVSGEKHVCLGLISSNHSCIEDRDAVVSRIYEAASYIPLERLSLSPQCGFASCEGDHRMTEEEQWKKIAFVKEIAKEIWG

SEQ ID NO: 244 - DNA, 1116 bp, Chlamydia pneumoniae
atggaaatgatgagcccattccaacaacctgagcaatgtcattttgatgttgtgggaagtttcttacgtcctgaaagtcttacacgagcacgctctgattttgaagaaggaagaattgtctatgagcagatgcgagttgtcgaagatgctgctattcgtaatctcataaaaaagcaaacagaagcaggtcttatcttttttactgatggggaattccgtaggtatagttgggatttcgactttatgtggggattccatggcgtggatcgtcgcagggactctaatgaccctgaaattggagtgtatcttaaagataaaatctccgtatcaaaacatccgtttatagaacatttcgagtttgtcaaaacttttgagaagggaaatgcaaaagcaaaacaaacgattccttctccatcacaatttttccatgagatgatttttgctcctaatctgaaaaatactcggaagttttatcctacgaatcaagagctaattgatgatattgtcttttattatcgccaagtcatccaagatctttatgctgcaggttgtcgtaatttgcagttggacgattgtgcttggtgtcgcctcttggatatacgagcgccttcttggtatggtgttgattctcatgacaggttgcaggaaattttagaacagtttttatggatccataatttagtgatgaaggatagacccgaggatctttttgtaagtctgcatgtctgtcgtggtgattatcaggccgagtttttctctagacgagcttatgattctatagaggagcctttatttgctaagaccgatgtggatagttatcactattattgggctcttgatgataagtattcaggaggtgctgagcctttagcttacgtctctggagagaaacacgtctgcttgggattgatctccagcaaccattcttgtattgaagatcgagatgctgtggtttctcgtatttatgaagctgcgagctacattcccttagagagactttctttgagcccgcaatgtgggtttgcttcttgtgagggagaccatagaatgactgaagaagaacagtggaagaagatcgcctttgtgaaagagattgctaaagagatctggggataa

SEQ ID NO: 245 - protein, 297 aa, Chlamydia pneumoniae
VWLRFLLLVSYDEKEKDVVVVCNHSEPNILGLPPEAVSQLIEELSDEGYSYLNVVRCDLSGETTVQQRLLLNADEGRSMTVVISELPEGHPDIRNLQLASERIFVSREKEAADAYASGCKVVAFDDEHLPWVSSHIAYAEEIREKQEQTMQGSLTEEQLGALLCNTVSTEKNLAFALDAVIKQSVWRFRNPDLFAYEREALEASVTDALVSYVSNLDMIPYTSSQGIVIEDSSIVRTSQEHTLIVNCAAFDKLASQIEFLCPSDVLPISGKDPLISDDEDEELNPKVSSAADSKDKT

SEQ ID NO: 246 - DNA, 894 bp, Chlamydia pneumoniae
gtgtggctgcgctttttacttttagtgtcctatgatgagaaggagaaagacgtagttgtcgtttgtaatcattctgaacctaatatcctcggcctgcctcctgaagcagtctctcagcttattgaagagcttagcgatgaaggctatagctatctgaatgtagtgcgttgtgatctctccggggagactacggttcaacaacgtctgctattgaatgccgatgaagggagatctatgacggtggtgatctcagagcttcctgaagggcaccccgatattcggaatttgcagttggcatccgaaagaatttttgtttctcgtgaaaaagaagctgctgatgcctatgcttcaggatgtaaagtggtcgctttcgatgatgagcatctcccttgggtctccagtcatattgcctacgcggaggagatcagagagaaacaagaacaaacaatgcaagggtctttaactgaagagcagttaggagcactcctctgcaacacagtctccacagagaaaaatctagcctttgctctagacgccgtgataaaacagtctgtgtggagattccgcaatccggatctttttgcttatgagagagaagctctagaggcttcagtaacagatgctttagtatcttacgtttcaaatttagacatgataccgtacacaagttctcagggcatagtcatagaagatagtagtatcgtccgtacctctcaagagcatacactcattgtgaactgtgcagcattcgataagttagcgagccaaatagagttcttatgccccagtgacgtgttgcccatttctggtaaagaccctttgatttctgatgatgaggatgaggaactgaatcctaaagtttcatctgctgcagactctaaagataaaacctag

SEQ ID NO: 247 - protein, 402 aa, Chlamydia pneumoniae
MTHCLHGWFSVVRHHFVQAFNFSRPLYSRITHFALGVIKAIPIVGHLVMGVDWLISHCFERGVSHPGFPSDIAPILKVEKIAGRDHISRIENQLKSLRKTIEVEDLDKVHGQYQENPYADMASSEVLKLDKGVHVSELGKAFSRVRNRITRSYSYAPTPQLDSIAIVGIDLVSPEEQENLVRLANEVIQLYPKSKTTLYLLIDFNKEWVGDISSDKEKQLRSLGLHSEVQCLSVLEPQGAEGEDTKHFDLMVGCYGKDSYLREGKILQQALGTSLGTVPWVNVMHTLPSRYRSRLSLPINTEKDKTELYKEISRTHHQLHTLGMGLGAQDSGLLLDRQRLHAPLSQGSHCHSYLADLTHEELKILLFSAFVDAKNISKKELREVSLNFANDTSVECGCAFYF

SEQ ID NO: 248 - DNA, 1209 bp, Chlamydia pneumoniae
atgactcattgcttacatggttggttttctgtagttcgtcatcactttgtgcaggcgtttaatttctcacgtcctttatattctcgaattacccacttcgctttaggggtgattaaggccatccccattgtagggcatcttgttatgggagtcgattggttgatctctcattgcttcgagaggggagtctcacaccctgggttcccttcagatattgctcctatactgaaagtagaaaagatcgcgggccgagatcatatttctagaatcgaaaatcagctaaagagccttaggaaaactatcgaggttgaagatctagataaagtccacgggcaatatcaagagaatccttatgcagatatggcctctagtgaggttcttaaactcgataagggagttcatgttagcgagcttggcaaagccttttctagagttcgcaatcgcatcaccagatcctatagttatgcccctactcctcagttggactctatagctattgttggtatagatctcgtcagtcctgaagaacaagagaatttagtacgcttggcgaatgaggtcattcaactctatcccaaatcaaagacaactctatatcttcttatcgattttaataaggagtgggtaggggatatctcctctgataaggaaaaacagctccgttctctaggtctacattctgaagttcagtgtctttccgtcttggaacctcagggtgccgagggcgaagatacgaaacactttgaccttatggtcggctgttatgggaaggattcttacttaagggagggtaaaattttacagcaggccctagggacttcgttaggtactgttccctgggtgaatgttatgcacacattgccatctaggtatagatctcggctttccttacctataaataccgaaaaggataagacagagctttataaagagatttctcgtacacaccatcagttgcatactttgggaatgggacttggagcccaggattcaggattgctcttagaccggcaacgactccatgctcctttatctcaagggtctcactgccattcctatcttgcagatctcacccatgaagagctgaaaattttgttattttcagcatttgtggatgctaagaacataagtaagaaagagcttcgtgaggtatctctaaattttgctaacgatacttccgtagagtgtggctgcgctttttacttttag

SEQ ID NO: 249 - protein, 582 aa, Chlamydia pneumoniae
MASCLSAWFSIVREHFYRAFDFSLPFCARITEFVLGVIKGIPVVGHIIVGIEWLVSRYLESFVTKPTFVSDVVSLLKTEKVAGRDHIARVVETLKRQRVAVAPEDEDKVHGKIPVHPFGGIQPVEVLTLYPEVQDATLGLAFSKIRNRVRQAYLQAPRPKLQKIYIIGNDMNPFEVDDFLHLARLCNETQRLYPDATISLYLTASGGRNAMDKKNRKLLSDCELNPKIACLDFNQGDVVKQATCDCWMVYHGENDQGTLNQIQEELEKSGEETPWIHVGQKPLSQSLWDFSPFSSLEMKGDKEKALEYSELEKEQLYSRLVYVGERSSVLSLGFGDSRSGILMDPKRVHAPLSEGHYCHSYLADLENPGLQKTILAAFLNPKELSSTILQPISLNLILNSKTYLRQHFGFFERMSRSDRNVVVVVCDSWWGTDWKEEPSFQHFIMELECRGYSHFNIFAFRSNSMCVEERRILNESSQEKAFTMIFCEDSVSQGDIRCLHLASEGMLCGKECYAVDVYTSGCANFMMEEVLTLERESNLWNRKHGLWKREVRKQKQEAALDQDESEIYVCNQLTAQQNFACS

SEQ ID NO: 250 - DNA, 1749 bp, Chlamydia pneumoniae
atggcttcttgtttatctgcctggttttctatagttcgtgagcacttttatcgagcctttgatttttctttgccgttttgtgctcgtattacggaatttgtattaggggtcatcaaggggatccctgttgtgggtcacattattgttgggatagagtggctcgtttctaggtatttagagagtttcgtgaccaagccgacatttgtctctgatgtggtgagtcttctgaaaacagagaaagttgctggtcgcgatcacattgctcgtgtagtggagactttgaagaggcagagagtcgctgtggctcctgaagatgaggataaggtccatgggaagattcctgtgcatcctttcgggggaatccaacctgtagaagttctcactctctatcccgaagttcaagatgcaacgttagggcttgccttctctaaaattcgtaatcgtgtaagacaggcgtatttgcaagctccacggccaaaactgcagaagatttacatcataggaaacgatatgaatccttttgaagttgacgacttcttgcatctagcccgtctctgtaatgaaactcaaagactctatcctgacgctacgatttctctatatctaacagcttctggtggtcgcaatgctatggacaaaaagaatcggaagttacttagtgattgcgaactaaaccccaagattgcttgtttggactttaatcagggtgatgtagtcaaacaagcaacttgtgactgttggatggtgtatcatggggagaatgatcaaggtacgttgaatcagattcaggaagagttagaaaagtcaggggaggaaaccccttggattcatgtggggcaaaagcctctttcacaatccttgtgggatttctctccattttcatctttggagatgaagggagataaagagaaagctctagagtactctgaattagaaaaagaacagctatattctcgattggtatacgtaggagagcgctcttcggttcttagtttggggtttggagatagtcggtcagggatcttgatggacccaaaacgggtgcatgctcccttatctgaagggcattattgtcattcctaccttgcagacttagaaaatcccgggttacaaaaaacaattttagcggcatttctgaatcctaaggagttgagcagtaccatactgcaacctatatctctaaatcttatcttaaatagcaaaacttacttaaggcagcactttggcttttttgagaggatgagcagaagtgatcgcaatgtggttgtcgttgtatgtgattcttggtggggtaccgactggaaggaggagccaagcttccaacactttattatggagctagagtgtcgagggtattcgcacttcaatatttttgcctttagatctaatagcatgtgtgtagaagaacgtaggatcttaaatgaaagttctcaagagaaagcctttaccatgattttctgtgaggattcagtatctcaaggagatatccgctgtttgcatttggcgtctgaaggaatgctttgtggtaaagagtgctatgctgtcgatgtctatacgtcaggatgcgcgaactttatgatggaagaagtcttaactttggagcgagaatctaatctgtggaatagaaagcatggtctttggaaaagagaagttagaaaacagaaacaagaagctgctttggatcaagacgagagcgagatttacgtttgtaatcagctgacggcgcaacagaacttcgcttgttcttga

SEQ ID NO: 251 - protein, 695 aa, Chlamydia pneumoniae
LFVSNFIFFVVMPIPYISSWISTVRQHFVKAFDFSRPFCSRVTNFALGVIKAIPIVGHIVMGMEWLVSSCVAGIITRSSFTSDVVQIVKTEKALGRDHISRVAEILQRERGTITPENQDKVHGKFPVCPFGRLKSEETLKLKPGEREGTLDTVFSPIRTRVTRAYLQAPRPEIRTISIVGSKLKTPQDFSQFVSLANETQRLHPEALVCLYLTGLNRESQMCDTTTAEKKQYLHNSGLDSRIQCKDSKEDDAGSPENPELWIGYYSREQQHNIDGQYIQQCLGKSADPIPWIHVTEDTKDFYYPPNFTSYSHTRQSTDPTSPPRLPESEGDKDSLYGQLSRSYHHEYMLGLGLKPEDAGLLMDPDRIYAPLSQGHYCHSYLADIENEDLRTLVLSPFLDPGNLSSEDLRPVAFNIARLPLELDSLFFRLVAGQQEGRNIVTLAHGTPRPEDLDPDSMNILTRRLQMSGYSYLNIFSYKSRKMIVKERQFFGDRSEGKSFTLILFEDPISAADFRCLQLAAEGMVAKDLPSVADICASGCSCIQFSEMQSPQAIEYRQWEARVEDEAGEEAREPVIYSQDQLSSMLTTQQNFVFSLDAVVKQAIWRFRSKGLLTMERKALGEEFLTAIFSYLGSQERNENMGKRTTEEHEVVISFEELDRMVQVLPAEVPADSGNDPTRPVPNPDSNPDSSQNEGS

SEQ ID NO: 252 - DNA, 2088 bp, Chlamydia pneumoniae
ttgtttgtttctaattttattttttttgttgttatgccaattccctatatttcttcttggatttctaccgttcgacagcattttgttaaggcgtttgatttctctcgtcccttttgttctagggttacgaattttgctttaggggtcatcaaggccatccctattgtaggacatattgtcatggggatggagtggttagtttcttcctgtgttgccgggattattactaggtcctcctttacctcagatgtcgttcagattgtaaagactgagaaggcgttaggtcgagatcatatatctcgagtggcggagatattgcaaagagaaagggggaccataactcctgagaatcaagataaggtgcatgggaagtttcctgtctgtccttttggtcgtttaaaatccgaggaaactttaaaacttaagccgggagaaagagagggaactttagatactgtattttctccgattcgcacgcgcgtgactcgtgcgtacttacaggccccccgacccgaaatacgtacgatttctattgtgggttcgaaacttaaaactcctcaagatttctcgcaatttgtgagtctcgcgaatgaaacgcagagactgcatcctgaagcgttagtttgtctgtatttgacaggcttgaatcgcgaatctcagatgtgcgatacaactactgcagagaagaagcagtacctacataactcaggtctcgactctagaatccagtgcaaagacagtaaagaagacgacgctggctctcctgaaaatcccgaactttggattggctattattcacgagagcaacagcataatatagacgggcagtatattcagcagtgtctagggaagagtgcagatccaattccttggattcatgttactgaagacacaaaggatttttattacccaccaaactttacttcatactcacatacaagacaatctacagacccaacatcgccaccaagactccctgaaagtgagggggataaggattccttgtacggacaactgagtcgatcgtatcaccatgagtatatgcttggtttgggattaaaaccagaggatgcaggactcctgatggacccggatagaatctatgctcctctatcccaagggcattattgtcattcctaccttgcggatatagaaaatgaggatctacgaactttagtcctttcgcctttcctagatcctggcaatcttagtagcgaggatcttcgtcctgtagcattcaatatcgctagattgccattagaattggactcgttatttttccgccttgttgcgggtcagcaagaagggagaaacatagttacccttgcccacggaactcctcgtccagaagatcttgatcctgactcaatgaacattctgaccagaagattacaaatgtctggatatagctatttgaacattttctcctataaatcacggaaaatgattgtaaaagaacgtcagttctttggagatcgttctgaagggaagtctttcacattgatcttatttgaggatcccattagtgcagcagatttccgttgtttgcagctagctgcagaaggtatggttgctaaggatctccccagcgtagcagatatttgtgcctctggatgttcctgcattcagttttctgagatgcagagtcctcaggctattgaatatagacaatgggaggcacgtgtcgaagatgaagcaggagaagaagccagagaaccagtaatttattctcaggatcaattgagcagcatgctcactacacaacagaattttgtattttctctagatgctgtggtaaaacaggcgatctggagattccgttcgaaaggtcttcttactatggaaagaaaggcactaggcgaggagttcttaactgcgatattttcctatttagggagtcaggagcgtaatgagaatatggggaaaagaactaccgaagaacatgaggtcgttatcagcttcgaagagctagatcgcatggtgcaagtcctcccagccgaagtccctgcagattcaggcaatgatcctacgcgtcccgttcctaatccagatagtaaccctgattcctcgcaaaatgaaggcagttag

SEQ ID NO: 253 - protein, 283 aa, Chlamydia pneumoniae
VIQHLLNFALEETPSISVQYQEQEKLSPCDHSPEIGKKKRWNKLESFSTYCSLFMSVKDHYKLNLGIQNSLSGWLLDPYRVCAPLSSPYSCPSYLLDLQNKELRRSLLSTFLDPKNLTSETFRSVSINFGNSSFGQRWSEFLSRVLHDEKEKHVAVVCNDAKLLEEGLSPEALSLLEEDLRESGYSYLNILSVSPEGVSKVQERQILRRDLQGRSFTVMITDLPLGSEDIRSLQLASDRILVSSSLDAADACASGCKVLVYENPNASWAQELENFYKQVERRR

SEQ ID NO: 254 - DNA, 852 bp, Chlamydia pneumoniae
gtgatacaacatcttctaaactttgctctagaagagaccccttccatttccgtgcaataccaagaacaagagaagctctctccgtgcgatcattccccagaaataggtaaaaagaaaagatggaataagctggaatccttctccacgtattgttctctgtttatgtctgttaaggatcattataagctgaatctaggaattcagaattccctgtcagggtggcttctggatccctatagggtttgcgcgcctttatcttcaccgtactcgtgtccttcctatcttttagatttgcaaaacaaagagctacgtcgttcccttctgtcaacgtttctagaccctaaaaatctcactagcgaaacattccgttctgtctctataaactttggcaactcttcgtttggacagagatggtcagagtttctatctcgtgttctgcacgacgagaaagaaaagcacgtagctgttgtttgtaatgatgcaaaacttctggaagaaggattgtccccagaggcattgtctctattagaagaagacttaagagaatcagggtattcgtatctaaacattctctcggtgagccccgaaggagtctccaaggttcaggaacgtcagattctaaggcgagatctccaaggacggtcctttactgtcatgattacagatcttcctttaggtagcgaagatatccgtagtttacaattagcctcggataggattttagtctccagttctcttgatgccgcggatgcatgtgcttcgggatgtaaagtcttagtctacgaaaatccaaatgcatcctgggctcaggaattggagaacttctacaaacaagttgagagaagaaggtag

SEQ ID NO: 255 - protein, 265 aa, Chlamydia pneumoniae
VACPSISSWFTVVRQHFVNAFDFTHPVCSRITNFALGIIKAIPVLGHIVMGIEWLISWIPRHTVRHGMFTSDVSSAIKVEQTRGHNCLAPLEAYLSSLRVPISQEDLGKVHGRTPEDPFVDITPTEIVQLLPDEELSTVDEALQGVRSRLTYAYRSVEKPMIQDLALVGFGLRDSADLINFVRLANGVQNHYPHTKVKLYLAKNLADVWDCEISEEEKGQLRALGLDPKIESISLTSAGLPSVPEVATVDFMITCYGKDQEVQDP

SEQ ID NO: 256 - DNA, 798 bp, Chlamydia pneumoniae
gtggcttgtccaagtatttcttcttggtttactgtcgttcgacagcattttgtaaacgcctttgatttcacccatcccgtttgttctcggattacaaattttgctttggggatcattaaggcaattcccgtattaggacacattgtcatgggaatcgagtggttgatttcctggattcccagacacaccgttcgtcatggaatgtttacttctgatgtctctagtgctattaaagtagaacaaacacggggtcataattgtttagctcccctagaagcctatttaagtagcttgagagtccccatttcccaagaagatctaggcaaagtacacgggagaaccccagaagatcccttcgtagatatcacacccacagaaattgtccaacttctccctgatgaagaactctctactgtagatgaggcactgcaaggcgttcgtagtaggttaacctatgcctataggtccgtagagaaacctatgattcaagatcttgctcttgtgggttttggtctccgagattctgcggacctcataaatttcgtgcgtcttgctaatggcgtgcagaatcactatccccatactaaagtgaagctctatttagcgaagaacttggcagatgtctgggactgtgaaatttctgaagaggaaaaagggcaactccgagctctaggtttagaccctaaaatagagagtatatcccttacgagtgcaggtcttccttcagtgccagaagtcgctactgtcgattttatgattacctgttacgggaaagatcaggaagtccaagatccctag

SEQ ID NO: 257 - protein, 389 aa, Chlamydia pneumoniae
MMKQGVGQDAKELYTFLSRGNEHYQPCLWFSLEEELGFLFDEKMLCAPLSEDHYCHSYLVDLVDQHLKDLILSMFLDPQNISAGELLKVSINVGDSFSPLQQKDFLSMVLRDETGKNVVVVFKGVLSLPATQVCKLVEELNSKDYSYLNIFSCHGDSSPQLLFRKELEGTSGRYFTVICALYLGDTDMRSLQLASERIMVSREFDLVDAYAARCKLLKIDHTNWRPGTFSRHADFADAVDVSAGFNSREFKLITQANQGILESGELPLPSKTFWEGFLAFCDRVTVTRHFIPMLDAAIKQAVWTHKHPSLIDKECEALDLKTQCLPSIVSYLEYVTNSHEKTSKGPFIQKEIIADCSPLKEALFPGSDEDVPSTSEDPSDDHPSDLEDS

SEQ ID NO: 258 - DNA, 1170 bp, Chlamydia pneumoniae
atgatgaaacaaggagtcgggcaggatgctaaagagctatacacatttctatctcgtgggaatgagcattaccaaccgtgtctatggttcagtctcgaagaggaactcggattccttttcgatgaaaaaatgctctgcgcccctctatctgaggatcactattgccactcgtatcttgtagatctagtggatcaacatttaaaggatttaatattatcgatgtttttagatcctcagaatatctcagcaggagaactcctcaaggtctctataaacgttggagattctttttctcctctacaacagaaagatttcctctcgatggtcttacgtgatgaaacgggaaaaaacgtcgtcgtggtttttaaaggagttctctccttacccgcaacccaagtctgcaaattagtagaggaattgaactctaaggactactcctacctcaatatattttcttgtcacggagatagtagtcctcagcttttattccgtaaggaattagagggaacttcagggcgttattttacagtgatttgcgctttatatctaggggatacagacatgcgtagtttacaacttgcttctgaaaggatcatggtctctagagagtttgatcttgtagatgcctatgctgcaagatgcaagctcttgaaaatcgatcatacaaattggagacctggaactttcagtcgccacgccgatttcgcagatgctgtagacgtatcagcaggatttaactcaagagaatttaaactgattacgcaggcgaatcaagggatcctagagtctggagaactcccgctcccttcaaaaaccttctgggaaggattcttagcattctgtgatcgagtgactgtcacgagacacttcattccaatgttagacgccgctataaagcaagcggtatggactcataaacatcccagcttgatagataaagagtgtgaagccctagacttgaaaacacagtgcttgccatctatcgtatcgtaccttgaatatgtcacaaactctcacgaaaaaacatcgaaaggcccgttcatacaaaaagagattatcgcagactgttctcctcttaaagaggcgctcttcccaggttctgatgaagatgttccctctacctctgaggatccttcagatgatcatccttcggatcttgaagactcttaa

SEQ ID NO: 259 - protein, 775 aa, Chlamydia pneumoniae
MASGIGGSSGLGKIPPKDNGDRSRSPSPKGELGSHEISLPPQEHGEEGASGSSHIHSSSSFLPEDQESQSSSSAASSPGFFSRVRSGVDRALKSFGNFFSAESTSQARETRQAFVRLSKTITADERRDVDSSSAAATEARVAEDASVSGENPSQGVPETSSGPEPQRLFSLPSVKKQSGLGRLVQTVRDRIVLPSGAPPTDSEPLSLYELNLRLSSLRQELSDIQSNDQLTPEEKAEATVTIQQLIQITEFQCGYMEATQSSVSLAEARFKGVETSDEINSLCSELTDPELQELMSDGDSLQNLLDETADDLEAALSHTRLSFSLDDNPTPIDNNPTLISQEEPIYEEIGGAADPQRTRENWSTRLWNQIREALVSLLGMILSILGSILHRLRIARHAAAEAVGRCCTCRGEECTSSEEDSMSVGSPSEIDETERTGSPHDVPRRNGSPREDSPLMNALVGWAHKHGAKTKESSESSTPEISISAPIVRGWSQDSSVSFIVMEDDHIFYDVPRRKDGIYDVPSSPRWSPARELEEDVFGDYEVPITSAEPSKDKNIYMTPRLATPAIYDLPSRPGSSGSSRSPSSDRVRSSSPNRRGVPLPPVPSPAMSEEGSIYEDMSGASGAGESDYEDMSRSPSPRGDLDEPIYANTPEDNPFTQRNIDRILQERSGGASASPVEPIYDEIPWIHGRPPATLPRPENTLTNVSLRVSPGFGPEVRAALLSESVSAVMVEAESIVPPTEPGDGESEYLEPLGGLVATTKILLQKGWPRGESNA

SEQ ID NO: 260 - DNA, 2328 bp, Chlamydia pneumoniae
atggcatcaggaatcggaggatctagtggattaggaaagattccacctaaagataatggggatagaagtcgatcgccctctcctaagggagaacttggcagccacgagatttccctgcctcctcaagaacatggagaggaaggagcttcaggatcttcgcatatacatagcagttcctcttttctaccagaagatcaggagtctcagagctcttcttcggcagcttctagcccgggatttttttctcgcgtacgttctggggtagacagggccttaaaatcatttggcaactttttttccgcagagtctacgagtcaagcgcgtgaaacgcgacaagcttttgttagattatcaaaaaccatcaccgcggatgagagacgggatgtcgattcatcaagtgctgctgctacagaagcccgagtggcagaggacgcgagtgtttcaggcgaaaatccttctcagggggttccagaaacctcttctggaccagaacctcagcgtttattttctcttccttcagtaaaaaaacagagcggtttgggtcggttggtacagacagttcgcgatcgcatagtacttcctagtggggctccacctacagacagcgagcctttaagtctctacgagctaaacctccgtttgagtagtttacgtcaggagctctctgacatacaaagtaatgatcagttgactccagaggaaaaagcagaagccacagttaccatacaacagctgatccaaattacagaattccaatgcggctatatggaggcaacacaatcttcggtatctctagcagaagctcgttttaagggggtagaaactagtgatgagatcaattccctctgttcagaactgacagatcctgagcttcaagaactcatgagtgatggagactctcttcaaaacctattagatgagactgccgacgatttagaagctgctttgtcccatactcgattgagtttttctttagacgataatccaactccgatagacaataatccaactctgatttctcaagaagagcctatttatgaggaaatcggaggagctgcagatcctcaaagaactcgggaaaactggtctacaagattatggaatcagattcgcgaggctctggtttctcttttaggaatgattttaagcattctagggtccatcttgcacaggttgcgtattgctcgtcatgcagctgctgaagcagtgggtcgttgttgcacgtgccgaggagaagagtgtacttcttctgaagaggactcgatgtcggtggggtctccttcagaaattgatgaaactgaaagaacgggctctccgcatgacgttccacgcagaaatggaagtccacgtgaagattctccattgatgaatgccttagtaggatgggcacataagcacggtgctaaaaccaaggagagttcagaatcaagtaccccggaaatttcgatttctgctcccatagtgagaggttggagtcaagacagttccgtcagttttattgttatggaagatgatcatattttctatgatgttcctcgtagaaaagatggaatctatgacgttcctagttcccctagatggagtcctgcgcgagagttggaagaggatgtttttggagattatgaagttcctataacctctgctgaaccatctaaagacaagaacatctacatgacacctagattagcaactcctgctatctatgatcttccttcacgtccaggatcgtctggaagctcacgttctccgtcttcagatcgcgtacgaagcagctcaccaaatagacggggtgtgcctcttcctccagttccttcacctgctatgagtgaggaggggagcatttatgaggatatgagcggtgcttcaggtgcaggtgaaagtgattatgaagatatgagccgttccccctctcctagaggcgacttggatgaacccatatatgctaatactcctgaagataatccatttactcagagaaatatagatagaattttacaggagaggtcaggcggtgcttccgcttctcctgtagagcctatttatgatgagatcccatggattcatggcaggccccctgctacacttccaagacccgagaatacattgactaatgtttcgcttagagtgagcccagggtttggaccagaagtaagagccgctttgcttagcgagagcgtgagtgctgttatggtcgaagcagagagtattgttcctccaacagagccgggggacggagaatcagaatatctagagcccttagggggacttgtagctacaacgaaaatcttactacaaaaaggatggcctcgtggagagtcgaatgcttag

SEQ ID NO: 261 - protein, 421 aa, Chlamydia pneumoniae
MTVAEVKGTFKLVCLGCRVNQYEVQAYRDQLTILGYQEVLDSEIPADLCIINTCAVTASAESSGRHAVRQLCRQNPTAHIVVTGCLGESDKEFFASLDRQCTLVSNKEKSRLIEKIFSYDTTFPEFKIHSFEGKSRAFIKVQDGCNSFCSYCIIPYLRGRSVSRPAEKILAEIAGVVDQGYREVVIAGINVGDYCDGERSLASLIEQVDRIPGIERIRISSIDPDDITEDLHRAITSSRHTCPSSHLVLQSGSNSILKRMNRKYSRGDFLDCVEKFRASDPRYAFTTDVIVGFPGESDQDFEDTLRIIEDVGFIKVHSFPFSARRRTKAYTFDNQIPNQVIYERKKYLAEVAKRVGQKEMMKRLGETTEVLVEKVTGQVATGHSPYFEKVSFPVVGTVAINTLVSVRLDRVEEEGLIGEIV

SEQ ID NO: 262 - DNA, 1266 bp, Chlamydia pneumoniae
atgacggttgcggaagtcaaaggaacatttaagctggtctgtttaggctgtcgggtgaatcagtatgaggtccaagcatatcgcgaccagttgactatcttaggttaccaagaggtcctggattctgaaatccctgcagatttatgcataatcaatacgtgtgctgtcacagcttctgctgagagttcgggtcgtcatgctgtgcgtcagttatgtcgtcagaaccctacagcacatattgttgtcacaggttgtttgggggaatctgacaaagagttttttgcttctttggatcggcaatgcacacttgtttccaataaagaaaaatcccgacttatagaaaaaattttttcctatgatacgaccttccctgagttcaagatccatagttttgagggaaagtctcgagcttttattaaagttcaagatggctgtaattctttttgctcgtactgcattattccttatttgcgggggcgttcggtttctcgtcctgctgagaagattttagctgaaatcgcaggggttgtagaccaaggatatcgcgaagttgtaattgcaggaattaatgttggagattattgcgatggagagcgttcattagcctctttgattgaacaggtggaccggattcctggaattgagaggattcgaatttcctctatagatcctgatgatatcactgaagatctgcaccgtgccatcacctcatcgcgtcacacttgtccttcgtcacaccttgttcttcaatcggggtcgaattcaattttaaagagaatgaaccggaagtattctcgcggagattttttagattgtgtagagaagttccgtgcttctgatcctcgctatgcctttactacagatgtgattgtcggatttcctggagagagtgatcaagattttgaagatactttgagaattattgaagatgtaggctttattaaagtgcatagtttccctttcagtgctcgtcgtcgtactaaggcatatacttttgataatcagattcccaatcaggtgatctatgagaggaagaagtatcttgctgaggttgctaagagggtaggccagaaagagatgatgaagcgtttaggagagactacagaggtgcttgttgagaaagtaacggggcaggttgctacgggtcactctccttattttgaaaaggtttctttccctgttgtaggaacggtagctatcaacactctagtttctgtgcgtcttgatagggtagaggaagaagggctgattggggagattgtatga

SEQ ID NO: 263 - protein, 536 aa, Chlamydia pneumoniae
MATSVPVTSSTSVGEANSSNERFTERTSRMYYAALVLGALSCLIFIAMIVIFPQVGLWAVVLGFALGCLLLSLAIVFAVSGLVLGKTLEPSREATPPEIVAQKEWTTQQDVLGNEYWRSELISLFLRGDLHESLIVDSKDRSLDIDQSLQNILKLEPLSTTLSLLKKDCVHINIILHLVRQWNLLGVDLSPEVTAHAEELLLFLIEEQYYSPDILKLIRYGDALQATSPLMDWADSGSFSVDADGVFSCRREECSPEDALAQFDLLLALENPDRRFLKDSFLTYIWSSSFFEKFLHRHLESLQRKLPETAIDVARYEAQIQTFLSRYFQKLDLINAMSLDWGYNCAEGEKCYESANQRLDNLFIAFSSSVPAMKRLFDKYGSVVRVDRRQIREQILSNTEILENESGFLCSLYEYPLSYLIDWAVLLDCVRGTEISLEDQADYTVCLQGLDSMLSQFASRLQSGQKVLNPRDVLSEQAAVMLVHGLAAQGVSFQGLKALMYLTAVPQRMWLGALPLFESFPVFNRMKEFLGESLGD

SEQ ID NO: 264 - DNA, 1611 bp, Chlamydia pneumoniae
atggcaacctctgttcctgtaacttcatctacttctgtaggagaggctaactcctccaacgaaagatttactgaacgaacatcgcgaatgtattacgcagctttagtcctaggggctttgagctgtttaatttttattgctatgattgtcattttcccacaggtcggattgtgggctgtggtcctcgggtttgctcttggatgtttacttttaagcttagctatcgtttttgctgtctccggtctcgttttaggcaagactttagaacctagtcgagaagcgactcctccagaaattgttgcgcaaaaggagtggactacacaacaagatgtcttagggaatgagtattggcgttccgagttgatttccttgttcttacgaggggatctccacgaatctctgattgttgattctaaggatcgatctttagatattgatcagagtttacaaaatatattgaaacttgagcccctatctacgacactttcgctgttaaagaaagattgtgtccacatcaatatcattttacatttagtgagacagtggaacttactgggagtggatcttagtcctgaagtcactgcgcacgccgaggaacttctactctttttgatagaagagcagtattactctcctgatattttgaaattgattcgctacggagatgctttacaagcaacgtctcctttgatggattgggcagattcaggttcctttagtgtagacgcagacggggtatttagctgtcgcagagaagaatgttctcctgaggatgctttggcgcaattcgatcttcttttggcgttggaaaatcccgacagacgcttcttaaaggattcttttcttacctacatttggtcgtcttcattttttgagaagtttttacatcgccatctagagagcttgcaaagaaagctcccagagacagcgatcgatgtcgcccgctatgaagcacaaatacaaacatttctctctcgctattttcagaagctcgatttgataaacgcaatgtccttagattggggatataactgtgctgagggagaaaaatgttatgagagcgcaaatcaaagattagacaacctatttattgctttttcttcttctgttcctgctatgaagcggctctttgacaaatatggttctgtggtacgggtagatcgtaggcagattcgtgagcagattctttcgaacactgaaatcttagaaaatgagtcagggttcctctgcagtttgtatgaatatcctttatcctatttgatagattgggctgttttgctagactgtgttcgcggtaccgaaatctctctagaagatcaggccgattacaccgtttgtttgcaaggcttggattctatgttatctcaatttgcgagtcgtttacagtctggacaaaaagtattgaatcctagagatgttttaagtgaacaggctgcggttatgcttgttcatggcttggcagcacagggcgtgtcgtttcaaggattgaaagctttgatgtatttgacagccgttccccaaagaatgtggttaggagcattgcctttatttgaatcttttcctgtctttaatcggatgaaagaatttcttggggaatctctgggagactag

SEQ ID NO: 265 - protein, 264 aa, Chlamydia pneumoniae; identical to SEQ ID NO: 87

SEQ ID NO: 266 - DNA, 795 bp, Chlamydia pneumoniae; identical to SEQ ID NO: 88

SEQ ID NO: 267 - protein, 279 aa, Chlamydia pneumoniae
MSSLLSCGRIEPTRVTCSLKTYLEDTSQNQLSTRLVRASVIFLCALLIILVCVALSSLIPSIMALATSFTVMGLILFVMSLLGDVAIISYLTYSTVTSYRQNKRAFEIHKPARSVYYEGVRHWDLGRSSLGTGEIPIVRTLFSPFQNHGLNHALAAKIFLFMEHFSPEPPNEPLVDWACLIRDFRPHVSSLCFVIEKQGSSLRTKEGNTICEAFRSDYDAHFAMVDCYRLIHSKLIIEKMGLKNIDIIPSVMVREDYPSRPGEGYREGLLRMYGGKGAL

SEQ ID NO: 268 - DNA, 840 bp, Chlamydia pneumoniae
atgtcatcactactgagctgcggaagaatagagccgactcgggttacctgtagcttaaagacgtatcttgaggatacgagtcagaatcagttgagcacacgtctagttcgggcaagtgtcatctttttatgcgcattgttgatcattttggtttgtgtggccctctctagtttgattccaagcattatggccttggcgacctcttttacggtaatggggttaattctttttgtgatgtcacttcttggtgacgttgcaattataagttatcttacttatagcactgttacgagttaccggcaaaataagagagcttttgagattcacaagcccgctcgctccgtttactacgagggggtccgccattgggatttaggacgatcatctttaggcacaggcgagattcctatagtaaggacgttattctctccatttcagaaccatggtcttaaccatgccttagctgctaaaattttcctatttatggagcatttcagccctgagccaccgaacgagcctttggtggattgggcctgtttgattcgggattttaggcctcacgtcagttctttgtgctttgttattgaaaaacaagggtcatcgctgaggactaaggaaggcaatacgatttgtgaggctttccgctctgattacgacgcccattttgctatggtagattgctaccggttgatccactctaagttgattatagagaaaatgggattgaagaatatcgatatcattccgagtgtcatggttcgtgaagattatcctagccgtcctggggagggctatcgcgaaggcctattacgtatgtatggtggcaagggggctctgtga

SEQ ID NO: 269 - protein, 359 aa, Chlamydia pneumoniae
MSGPSRTESSQVSVLSYVPRDKEIAPKKQFTIAKISTLAILASLALGALVAGISLTIVLGNPVFLALLITTALFSVVTFLVYHQMTSKVSSNWQKVLEQNFKPLGKAWQEKNVDCYSNEMQFYNNHLNPKFKVAIQTDASQPFQPTFLTGLRVIEKNQSTGIIFNPVGPTNLIDNTATNLSTILYSTLKDKSVWDTCKQREGGPAKGEDPFSPTEVRVVKLPNEALDQTFNLNLSSAEKKSILPTFLGHVCGPKSEELPNQQEYYRQALLAYENCLKAAIESHAAIVALPLFTSVYEVPPEEILPKEGTFYWDNQTQAFCKRALLDAIQNTALRYPQRSLLVILQDPFNTIESQSRSEE

SEQ ID NO: 270 - DNA, 1080 bp, Chlamydia pneumoniae
atgtcaggaccctcacgtactgagagctctcaagtttctgtactatcctatgtgcctcgggataaagaaattgctcctaaaaaacagtttaccatagcaaaaatatccactcttgcaatcctagcttctttagctttaggagctttggtggctggaatctctttaacgatagtattagggaaccctgtatttttggctcttctcattaccacggccctcttctcagttgtaaccttcttagtctaccaccaaatgacctcaaaggtatcttctaactggcagaaagttctagagcaaaacttcaagcctttgggaaaagcgtggcaagaaaaaaacgtagactgctactcaaacgagatgcaattttacaataatcacctgaaccctaagttcaaggtagcgatacaaacagatgcgtctcaaccatttcagcctactttcttaactggacttagagtgatcgaaaaaaatcaatccacagggatcatctttaatcccgtaggcccaacgaatctgatcgacaacactgcaacgaacctctctactatcctttactccaccctaaaagataaaagcgtgtgggatacatgcaagcaacgcgaagggggtcccgcaaaaggagaagaccccttttcccctaccgaagtgagagtagtaaaacttccaaacgaagctctagatcaaacgtttaatctaaatttaagctctgcagaaaagaaaagtattcttccgacctttttaggccacgtatgcggccctaaatctgaagagttaccaaatcagcaagaatattatcgccaagctttactagcgtacgagaactgccttaaagcagctatagaaagtcatgcagcaatcgttgctcttcctctctttacttcggtctatgaagtgcctccagaagagattcttcctaaagaaggcactttctattgggacaaccaaactcaagcgttttgcaaacgcgctttattggacgctattcaaaatacggccctacgctatcctcaaagatctttacttgttatactccaagatccttttaatactatagaatcacaaagtcgttctgaggagtaa

SEQ ID NO: 271 - protein, 312 aa, Chlamydia pneumoniae
MWRVVLRFLIIFILGRAVFPLRASESFSWETSTCLTVLGIPFIDIILTTNEDFVAQCGLQIGTISSTNNAKIKEIFLIYKEKFPEASISFKRKEPLNLSQSHLSDLGILCMRNGETYAEGMANKENGPALKQPKDLRLVLRCPNQPDTLLYSEKEAEKGIETNTCLCNQGYTLLDGQLILYGDSIEKFLKETKRKNNHTLVDLCDSQVVTTFLGRFWSLLNYVQVLFLSEDSAKILAGIPDLAQATQLLSHTVPLLFIYTNDSIHIIEQGKESSFTYNQDLTEPILGFLFGYINRGSMEYCFNCAQSSLGET

SEQ ID NO: 272 - DNA, 939 bp, Chlamydia pneumoniae
atgtggcgcgttgtcctcagattccttataatttttatcttgggaagagccgtcttccctctaagagcttcagaaagcttctcctgggaaacatcgacctgtttaacagtgctagggattcctttcatagatattatcctcacaacgaatgaggactttgttgcccagtgcggcctgcaaataggaaccatttcttcgactaataacgcaaaaataaaagaaatttttttgatatataaggaaaaatttccagaagcctctatcagtttcaaacgaaaagaacctctaaacctttcccaatcccatctctccgatttaggtattttatgtatgcgtaacggagaaacttacgctgagggaatggcaaataaagaaaacggacccgctctaaaacaacccaaggatctaagattagttttacgttgtcctaaccaaccagataccctgctctactcggaaaaagaagcagaaaagggcatagaaacaaatacttgcctatgcaatcagggatacacactcctggatgggcaattgattctctacggggatagtatagaaaagtttctgaaagagaccaaaagaaagaataaccacacgcttgttgatctttgtgactcacaagtcgtgaccacgttcctcggtcgcttttggtctcttctaaactacgttcaagttcttttcctatctgaagactccgctaaaattcttgcgggcatcccagacctagctcaagctacgcaattgctttcccacaccgtacctttgctttttatttataccaacgattctattcacatcatagaacaaggcaaagaaagtagttttacctataaccaagatttaacagagcccattttaggatttctctttggttacataaatcgcggctctatggaatactgctttaattgtgcacagtcttcattaggagaaacctaa

SEQ ID NO: 273 - protein, 379 aa, Chlamydia pneumoniae
VLVGICPSLYPEHPRSFYYRVSGDIGSRFDDRGFVNSGVETLPYSSGSFGIFWISFTDPTFNFAIVNTFMRTAGINEVSRPMTQDTETSLIEMRDLSEQQEANNTDSLEQEESLMGIVGHTVGGVSMTVTSSPNIFYRIQTLLGLPETLAEAEENPTFPNSTIDSLAEIMMNLVRISDAVSIFWIFPIVDTTYNGVLLAVCIGFFGINGICSTFLMLTNPRSRRDRWRNLRIMVLCYRSLGSGMNLFDLSNNVRMAARRHVTSCTVALYAMVTLFGWTVAIQDALQYGFPSVRDAFYRYCLRHRYCLTQRNEDSLQTTGTRFQVTRTHLEDQQMVASILNLSVFGLFFGFVGLMTTFGGLEISPSCRWDAANNRTVGIF

SEQ ID NO: 274 - DNA, 1140 bp, Chlamydia pneumoniae
gtgctcgttggtatctgtccttctctatatccagaacatcctcgctccttttattatcgtgtttctggagatataggctcccgattcgacgatagaggatttgtaaactctggagtcgaaaccctgccatactcttcaggcagctttgggattttttggatctcgtttacggatcccacatttaattttgctatcgtaaatacctttatgcgaactgcagggatcaatgaagtctctagacccatgacacaagatacagaaacttcattgatagaaatgagagacctaagtgaacaacaagaagcgaataacacagattctttagagcaagaagagagcttaatgggtattgtaggacatactgtgggaggagtttccatgaccgtgacctccagtccaaatatcttttatcgtatacaaacacttctgggactgccagagactcttgcagaagctgaagaaaatcctaccttcccaaattctactatagatagccttgcagaaataatgatgaacctcgtaaggatctctgatgctgtctctattttctggatttttcctatcgtagatactacatataatggagttttattagccgtctgtatcggcttcttcggaatcaatgggatttgttccacgttccttatgcttacgaatccacgctctcgtcgagatagatggaggaatttacgcatcatggttctttgctatcgttctttgggaagcggaatgaatctctttgatcttagcaataatgtgcgcatggcagcacgtaggcatgtgacatcatgtacagtagctctctatgctatggtcactctatttggatggacagtagcaatacaagatgctttgcaatatggtttccctagcgttcgggatgccttctatagatattgcttacgccacagatattgcttaactcaaagaaacgaagactctctgcaaactacaggaacgcgctttcaggttacccgtacacatctagaagatcaacagatggtggcttctattttgaatttgagtgtttttgggctcttttttggattcgtagggctaatgaccacgtttggaggattagaaatctcaccatcttgtcggtgggatgcagcaaataaccgaacggtaggtattttttag

SEQ ID NO: 275 - protein, 369 aa, Chlamydia pneumoniae
MAPIHGSNAFVEDILHSHPSPQATYFSSTRAQKLHEFKDRHPVLTRIASVIIKIFKVLIGLIILPLGIYWLCQTLCTNSILPSKNLLKIFKKQPNTKTLKTNYLHALQDYSSKNRVASMRRVPILQDNVLIDTLEICLSQAPTNRWMLISLGSDCSLEEIACKEIFDSWQRFAKLIGANILVYNYPGVMSSTGSSSLKDLASAHNICTRYLKDKEQGPGAKEIITYGYSLGGLIQAEALRDQKIVANDDTTWIAVKDRCPLFISPEGFHSCRRIGKLVARLFGWGTKAVERSQDLPCLEIFLYPTDSLRRSTVRQNKLLAPELTLAHAIKNSPYVQNKEFIEVRLSSDIDPIDSKTRVALATPILKKLS

SEQ ID NO: 276 - DNA, 1110 bp, Chlamydia pneumoniae
atggctccaattcacggaagtaatgcgtttgttgaggatattttacattcccacccttctccacaagcgacttatttttcttcaacacgcgcccaaaaacttcatgagtttaaagacaggcatcccgtgcttacacggattgcttctgtaattattaaaatttttaaagttctgatagggctgatcatccttcccttaggaatctactggctatgtcaaacgctttgtacaaactcgattctcccttccaagaatttattaaaaattttcaagaagcaacccaacactaaaaccttaaaaactaattatttgcatgctttgcaagattattcctcgaaaaaccgcgttgcttccatgagacgagttcctatcctccaggataatgttctcatcgacactttggaaatatgcctttcacaagcacctacgaatcgttggatgctcatttctttaggaagtgactgtagcttggaagaaatcgcttgtaaggagatctttgattcttggcaaagatttgccaagttgataggggccaatatactcgtttataactaccccggagtcatgtccagcacagggagcagcagcctaaaggacctagcatcagctcataatatttgtacaagataccttaaagataaagaacagggccctggagcaaaagaaatcattacctatgggtactccctaggaggtttgatacaagcagaagcattgcgagaccagaagattgttgcaaacgatgatactacttggatagcagtcaaagataggtgtcctctctttatatctccagaaggtttccacagttgcagacgcataggaaagctagtagctcgtctttttggctgggggaccaaagccgtagagagaagccaagaccttccctgcctagaaatttttctctatcctacggattccttacgaagatcaacagtcagacagaacaagctcttagcacctgaacttactctcgctcatgcgataaaaaatagtccctatgttcaaaataaagaatttatagaagtacgattatcgtctgatatcgatcccatcgacagcaaaacaagagtggctcttgccacaccaattttgaaaaagctctcttag

SEQ ID NO: 277 - protein, 486 aa, Chlamydia pneumoniae
MHMSNPISLFSPAELIAKYNLIPKTSPIYPRRTELIILEENACQTRLTNVAQVLHPSSLFSMSKKILNPCGCSGGPLCWVILNILAFIITSVLFIILLPVNLIVAGLRLFMPLPPKKIVEDLSEPTTEETNEVIQPFIFALQALLFEDNKLRSFKIVEQSVGKAPLPNPFLNRLVAISPQESQEAMRKIPDLCSQLKKVLKSLGVLTPEWKHMLKYFEGLKNEHDSNPDKKTFPILIKLLIEALTGKSSLPKTPSTKEKMQAALFIASSCKTCKPTWGEVITRSLNRLYSIANEGDNQLLIWVQEFKERELMSIQDGDDAEEYRFAAQQHGERYTEAIEQVLRNESAAKLQWHVINTMKFFHGKNLGLVTEHLQDTLGALTLRQTTVDTHQGREDADLSAALFLNKYLNSGNQLVNSVFKSMQKADPETKALIREFALDILYASLRLPQTSAHTEVFSTLLMDPETYEPNKACIAYLLYVLKIIEL

SEQ ID NO: 278 - DNA, 1461 bp, Chlamydia pneumoniae
atgcatatgtctaaccccatctctttgttttcccctgcagagttaatagcaaagtacaatttaattccaaaaacttcgccgatttatcctcggaggacggaacttattatcttggaagaaaatgcgtgtcaaacacgcctaaccaacgtggctcaggtcctacatccttctagcctattcagtatgtcaaaaaaaatactgaatccctgcgggtgctctggtggtcccttatgttgggtgattctcaacatcctagcatttattattacttcagtactgtttatcattcttttaccggtgaatctcatcgtagcaggtcttcgtctcttcatgcctcttccccctaaaaaaatcgtagaggatttaagtgaacctactactgaagaaacgaatgaggtcattcaacccttcattttcgctttgcaagcgttgctttttgaggataacaaacttcgctcttttaaaattgttgaacaaagtgtaggcaaagcacccttacctaatccctttttaaatagactagtagcaatttcgccgcaagaaagccaagaagccatgcggaagattccggatctatgctcacaactgaaaaaagtattaaagtctctaggcgtgctaactccagaatggaagcacatgctgaagtactttgagggactgaaaaacgaacatgatagtaatcctgataaaaagacgttcccaatattgatcaagctcctcatagaagctcttactggaaagtcctctttacccaaaactcctagtacaaaggaaaaaatgcaagcggccttatttattgcaagttcttgcaagacttgtaagccgacttggggagaagtcataaccagatctcttaacagactctatagtatagctaatgaaggagacaatcagcttctgatttgggttcaagagtttaaagaacgagagctgatgtccatccaagatggtgatgatgctgaagagtatcggtttgcggctcagcaacacggtgagcgttacacagaggcaatagaacaagttctacgaaacgagtcagcagccaaactacaatggcatgtgatcaacactatgaaattcttccatgggaaaaatctcggtctagttacagaacacctacaagatactctcggcgccctaactttacgtcaaactacagtggacacacatcaaggcagagaagacgctgatttgtcagctgctcttttcctaaataagtatttaaattctggaaatcaacttgttaatagcgtctttaaatccatgcaaaaagcagatccagaaaccaaagctttaatccgtgagtttgctctagatatattatatgcatccttacggcttcctcaaacttccgctcataccgaggtcttttctacactcttaatggacccagagacctatgaacctaataaagcttgtatcgcctacttgctctatgtattaaagatcatcgaactataa

SEQ ID NO: 279 - protein, 527 aa, Chlamydia pneumoniae
MPGSVSSPPLSPVIVRERVPSSSGSDLIQPHAVLKISILIFALVTILGIVLVVLSSALGALPSLVLTVSGCIAIAVGLIGLGILVTRLILSTIRKVDAMGYDAAVKEEQYLSRIRELESENREIRDRNRAVEDQCAHLSEENKDLRDPEYLHGMTERLIASLEIENQALVAENILLKDWNASLSRDFRAYKQKFPLGALEPWKEDIACIMEQNLFLKPECIAMVKSLPLETQRLFLYPKGFQSLVNRFAPRSRFFQTPKYEYNSRNENEDGKVAAVCARLKKEFFSAVLGACSYEELGGICERAVALKETLPLPEAVYDTLVQEFPNLLTAESLWKEWCFYSYPYLRPYLSVDYCKRLFVQLFEELCLKLFTTGSPEDQALVRLFSYYRNHIPAVLASFGLPPPETGGSVFVLLPKQENLLWSQIEVLATRYLKDTFVRNSEWTGSFEMMFSYNEMCKEISEGRIRFAEDYETRHSEEFPPSPLSEEGEGEEFLPPCSEEEVSVLERPDLDVDSMWVWHPPVPKGPL

SEQ ID NO: 280 - DNA, 1584 bp, Chlamydia pneumoniae
atgccaggttctgtgtcatcacctcctttgtctcctgtaattgtccgtgaaagggtcccatcctcttcaggatccgacctcatacagcctcatgctgttttaaagatctccatcctaatttttgcgcttgtgacaattttaggaattgttcttgtagtgttgtctagtgctttaggagctcttcctagtttagttttgacggtttctggttgtattgcaatagctgtaggcctgattggtttagggattcttgtgacacggctgattctctctacgatcagaaaagtagatgccatgggttatgatgctgcggtcaaagaagagcagtatttgtcacgtatcagagaattagagtctgaaaatagagagattagagatagaaatcgtgctgtcgaagatcagtgtgcccatttatccgaagagaacaaggaccttagggatcccgaatatctacatggaatgactgaaaggctcattgcgagcttagaaatagagaatcaagctctcgtagctgagaacattcttctcaaagactggaatgcaagcctatctagagatttccgcgcatataagcaaaaatttcctcttggggcattagaaccctggaaagaagatattgcatgtatcatggaacaaaatctctttttaaaaccggaatgtatcgcgatggttaagtctcttccattagagacgcaacggctgtttttatatccaaaaggatttcagtctttagttaatcgatttgctccgcggtctcgctttttccagactccaaagtatgaatataacagtaggaatgaaaatgaggacggaaaggtagccgcagtgtgcgcccgtttgaaaaaagaattcttcagtgctgttttaggagcctgtagttacgaagaactagggggcatttgtgaaagagcagtagcacttaaagagacgttgccattgcctgaagctgtctatgataccctagttcaggagttcccaaatcttcttactgctgagagtttatggaaagaatggtgcttctattcctatccctaccttcgtccctatctttctgtggattactgtaagaggttatttgtacaactttttgaggaactctgcctaaagctttttacaacgggatctccagaagaccaagctttggttcgccttttctcttactataggaatcatattcccgcagtcttggcctcatttggtttgcccccgcctgagacaggggggtctgtatttgtattgctaccaaaacaagaaaaccttctttggagtcaaattgaggtgctggctacaaggtatctcaaagataccttcgtgagaaactcagaatggacgggctctttcgagatgatgttttcttataacgagatgtgtaaggagatctccgaaggaaggattcgttttgctgaagactatgaaacgaggcattccgaagaattccctccttcccctctctctgaagaaggagagggcgaagaattccttcctccttgctctgaagaagaggtttcggttcttgagcgcccagatctagatgtagactctatgtgggtctggcatccgccggtccctaagggacctctttaa

SEQ ID NO: 281 - protein, 423 aa, Chlamydia pneumoniae
MDKQSSGNSGCIWHPFTQSALDSTPIKIVRGEGAYLYAESGTRYLDAISSWWCNLHGHGHPYITKKLCEQAQKLEHVIFANFTHEPALELVSKLAPLLPEGLERFFFSDNGSTSIEIAMKIAVQYYYNQNKAKSHFVGLSNAYHGDTFGAMSIAGTSPTTVPFHDLFLPSSTIAAPYYGKEELAIAQAKTVFSESNIAAFIYEPLLQGAGGMLMYNPEGLKEILKLAKHYGVLCIADEILTGFGRTGPLFASEFTDIPPDIICLSKGLTGGYLPLALTVTTKEIHDAFVSQDRMKALLHGHTFTGNPLGCSAALASLDLTLSPECLQQRQMIERCHQEFQEAHGSLWQRCEVLGTVLALDYPAEATGYFSQYRDHLNRFFLERGVLLRPLGNTLYVLPPYCIQEEDLRIIYSHLQDALCLQPQ

SEQ ID NO: 282 - DNA, 1272 bp, Chlamydia pneumoniae
atggacaagcaatcatcagggaattcagggtgtatctggcaccccttcactcaatctgcattagattctacacccataaagattgtaaggggagaaggtgcttacctctatgcggaatcaggaacaagatatcttgatgcgatatcttcatggtggtgcaacctccacggtcatgggcatccctacattacaaaaaaattatgtgagcaagcacagaagttagaacatgtgatcttcgcaaatttcacccatgaaccggctctagagctcgtatcgaaactcgctcccctccttcctgaaggtctagaacgtttctttttctctgacaacggatcaacgtctatcgaaatagcaatgaaaattgctgtgcaatattactacaatcaaaacaaggctaagagccattttgttggactcagcaatgcctatcacggagatacatttggagctatgtcgatagctggcacgagccctactacagttccctttcatgatctttttcttccttccagtacaattgctgctccctattatggcaaggaagagcttgccattgcccaagcaaaaacagtcttttctgaaagcaatatcgcagcgtttatctatgagccgctattgcaaggtgctggagggatgttaatgtataatcccgaaggcctaaaggagattctcaagcttgccaagcattacggggttctctgtattgctgatgaaattcttactggctttggccgtacgggtccactgtttgcttctgaatttacagacattcctcctgacattatctgtctttctaaaggtcttacaggaggctatctccctctagccttgacagtaaccactaaagaaattcatgatgcctttgtctcccaagatcggatgaaggcactgcttcatggccataccttcacaggaaatcctttaggctgtagtgctgccctcgcttctttggatctcaccctatctccagaatgcctacaacaaaggcaaatgatagaacggtgtcatcaagagtttcaagaagctcatggttccctatggcaacggtgtgaggttctgggcacggtactcgctctagattaccctgcagaagctacaggatatttttcacaatatagagaccatctcaatcgctttttcttagaacgtggagtccttcttcgtcctttagggaacacactgtatgtgctgcccccctactgtatccaagaagaagatctccggattatttattctcacctacaggatgccctatgtctacaaccacagtaa

SEQ ID NO: 283 - protein, 331 aa, Chlamydia pneumoniae
MREETVSWSLEDIREIYHTPVFELIHKANAILRSNFLHSELQTCYLISIKTGGCVEDCAYCAQSSRYHTHVTPEPMMKIVDVVERAKRAVELGATRVCLGAAWRNAKDDRYFDRVLAMVKSITDLGAEVCCALGMLSEEQAKKLYDAGLYAYNHNLDSSPEFYETIITTRSYEDRLNTLDVVNKSGISTCCGGIVGMGESEEDRIKLLHVLATRDHIPESVPVNLLWPIDGTPLQDQPPISFWEVLRTIATARVVFPRSMVRLAAGRAFLTVEQQTLCFLAGANSIFYGDKLLTVENNDIDEDAEMIKLLGLIPRPSFGIERGNPCYANNS

SEQ ID NO: 284 - DNA, 996 bp, Chlamydia pneumoniae
atgcgtgaagaaactgtatcctggtcattagaagacatccgcgaaatttatcacactcccgtatttgagctgattcacaaagccaatgccatattgcgtagtaatttcctccattcagaactgcagacttgctatctgatttcgattaaaactggtggatgcgttgaagattgcgcctactgtgcccaatcttcccgctatcatacccacgtcacaccagaacctatgatgaaaattgtagacgttgtggaaagggcaaaacgtgctgtagagctaggcgccactcgtgtgtgtcttggggctgcctggcgcaatgctaaggacgatcgatactttgatagagtcctcgctatggtgaaaagtatcacagatctcggagccgaggtttgttgtgctttaggcatgctctccgaagagcaagctaaaaaactgtatgatgcaggactttatgcctacaatcataatttagactcttctccggaattctatgaaactataatcacaacacgttcttatgaagatcgcctcaacactcttgatgtagtaaataaatctggcattagtacatgctgcggtggtattgtaggtatgggagaatctgaagaagaccgtataaagcttcttcatgttcttgcaacaagagatcatatcccagaatccgtacctgtaaatttactttggccgattgacggcacgcctttgcaagaccagcctccgatttctttctgggaagtcttgcgaaccatagcaacggcacgggttgttttccccagatccatggtacgacttgctgcaggacgcgctttcctcacagtagaacaacaaaccttatgttttctagccggtgccaactccatattctatggagataaactgttgactgtagaaaacaatgatatagatgaagatgctgaaatgatcaaacttttaggcttaatccctcgcccttcatttggaatagaaagaggtaacccatgttatgccaacaattcctaa

SEQ ID NO: 285 - protein, 480 aa, Chlamydia pneumoniae
MVCPNNSWFRMCGNFNCEWVEVTTTEETTRQSASDISEEAGSSGGAAPITTQPTKITKVEKRVQFNTAQGDESTIHMIQEAGELVDSILSHRRTQGCTEYCYDSYATGCGQRCGSFGRLICGTYKACCLDREDNQVAGLVHECEQTHGPIAVALAAKTMGLNLMELVEKNTILSEEQKNEFRQHCSEAKTQLYGTMQSLSQNFFLEGVNSIRERGLDDSLVQAVLSFIATRSWEKTIESEEASGTSSASNSTRIPACYILNTSPLTTSRLSCGSRDARRPSSVGAEPQYVAKKYNDNGMARQLGKIQVTNLKTGDFSALGPFGLLIVKMLNSFLLSASQSTSSILKHTGGEICYTCPNFRDIVVLLMLAIGYCPANTDETSVVDIHMIDDPIMTIFYRLQYSYRTGKTSASFLKKKPSLVRQESLDCPTPAESVPLMSSLEEEDENEDDDEDGNLAYQQRILECSGHLQTLFLGIKINKE

SEQ ID NO: 286 - DNA, 1443 bp, Chlamydia pneumoniae
atggtttgcccaaataattcttggttcagaatgtgtggaaatttcaactgcgaatgggttgaagtaacaacaacagaagaaacaacgcggcaatcggcttcagatataagcgaagaagctggttcgagtggaggagctgctcctataactacgcaacctactaaaattacaaaagtagagaaacgtgtccaatttaatactgctcaaggtgatgaaagtacaatacacatgatccaagaagcaggagaattggtagactccattctatcacatagacgaacgcaaggatgtacagagtattgttatgacagttacgcaactggatgtggtcagcgttgcggatcttttggaagactcatttgtggaacgtataaagcgtgttgcttagacagagaggataatcaggttgctggacttgtccatgaatgcgaacagacccatggtcctattgccgttgctttagctgctaaaactatgggcctcaacttaatggaacttgtagaaaaaaacactattttgtctgaagaacagaaaaatgaatttagacagcattgctcggaagctaaaacccaactctatggaacgatgcagagcctttctcaaaactttttccttgaaggagtcaacagcattagagaacgcggtctagacgattcactagtccaagccgtgctaagctttattgctacaaggtcttgggaaaaaactatagaatcagaggaagcctcaggaacatcttctgcttctaattctacacgcattcctgcgtgctatatcttaaatacgagccccttaacgacgtcacgcctatcctgtggatcaagagatgcgcgacgcccatcttcagtcggtgcagagccccagtacgtagcaaaaaaatacaatgacaatggcatggccagacaattaggaaaaatccaagtcaccaatctaaaaacaggagatttttcagctttaggtccttttggtctcctgattgtgaaaatgctgaatagctttctcttatctgcatcacaaagcacatcttctattctaaagcacacaggtggagaaatatgttatacgtgcccaaattttcgtgatatcgtcgttttattgatgttagcgattggctattgccctgcaaataccgatgagacatctgtcgtagatatacacatgatagatgatccgattatgaccatcttctatcgactacaatacagctatagaacagggaaaacttcagcatcgtttttaaaaaagaaaccctcattagtaagacaggaaagtcttgattgtcctacccctgcagaatctgtccctctcatgtcaagtctcgaagaagaagatgaaaatgaagatgatgatgaggatgggaatttggcgtatcaacagcgtatccttgaatgctcgggtcatttacaaactctatttttagggataaaaataaacaaagaataa

SEQ ID NO: 287 - protein, 167 aa, Chlamydia pneumoniae
MTRSTIESSDSLCSRSFSQKLSVQTLKNLCESRLMKITSLVIAFLTLIVGGALIALAGGGVLSFPLGLILGSVLVLFSSIYLVSCCKFFTLKEMTMTCSVKSKINIWFEKQRNKDIEKALENPDLFGENKRNVGNRSARNQLEMILHETDGIILKRYMKGAKMYFYL

SEQ ID NO: 288 - DNA, 504 bp, Chlamydia pneumoniae
atgactagaagtactattgaaagcagtgattcgctatgctcaaggtctttttctcaaaaattaagtgtccagacattaaaaaatctctgtgaaagtagattaatgaagatcacttctcttgtgattgctttcctaactctaattgtggggggtgctcttatagctttagcaggagggggggttctttctttccctcttgggctaatcttaggaagcgtactcgttttgttttcttctatctatttagtctcttgttgtaaattttttactttaaaagagatgacaatgacctgtagtgtcaaatctaaaatcaatatatggtttgaaaagcaacgaaacaaagacatcgaaaaggcattagagaatccagatctctttggagaaaataagagaaatgttggaaatcgttcggcaagaaatcaactagaaatgatcttacacgagactgacggaattattttgaaaagatatatgaaaggagctaaaatgtacttttatttatga

SEQ ID NO: 289 - protein, 195 aa, Chlamydia pneumoniae
MNWVPKTIDHVDPESEIDIRKVVSCYKLIKECQPEFRSLISELLGVIRCGLRLLKRSKYQEQARTVSDEDAPLFCLTRSYYQDGYLTPLRAGPRDLINHYIHLRRRENPKHFFSPKHPCYYARLAFNESVCVYRELFDIERLTKMYVEGDYSKEQEKNLQAILSFVKTLDEGKDFLIEHKDTDLIGRGFTDVFCT

SEQ ID NO: 290 - DNA, 588 bp, Chlamydia pneumoniae
atgaattgggttccaaaaacaatagaccatgtagatccagaatcagagatagatatacgtaaagtcgtctcctgctataagttgataaaagaatgtcaacctgaatttcgatctcttataagtgaattactaggagtgattcggtgtggcttaagactattaaaacgttctaagtatcaagaacaggctagaactgtatctgatgaagatgcacctcttttctgcctgactcgttcttattatcaagatggttatctcacgccattaagagcaggacctcgtgatcttataaatcactatatacacttgcgtcgccgagagaatcctaagcattttttcagtcctaagcatccatgttattatgctcgattggcttttaatgagtcagtgtgtgtctatagagaactctttgatatagagcgacttacaaaaatgtatgtcgagggtgattattctaaagaacaagagaaaaacctacaggctattcttagttttgtgaaaactctagatgaaggaaaggactttcttattgaacataaagataccgatctcattgggagaggttttactgatgtgttctgcacttaa

SEQ ID NO: 291 - protein, 155 aa, Chlamydia pneumoniae
MGYLPVSATDVLFESPAAPLINSANTQNQKLIELKGKQQAESSPRTITSVILEVLLVIGCCLIVLSLLAIRPALQFTLETGHPAAIAVLAVSGTILLVAVIILFCFLAAVPFAAKKTYKYVKTVDDYASWHSHQQTPTLGTIFSGIVYAESQAQL

SEQ ID NO: 292 - DNA, 468 bp, Chlamydia pneumoniae
atgggatatcttccagtatctgctacggacgttctttttgaaagtccagccgctcccttaatcaatagcgcaaacacacaaaatcagaaactcatagaactcaaggggaagcagcaagctgagtcttctccacggacaatcacttctgtcatattggaagttctcctagtgatcggatgctgcctcatagttcttagtttattggcaatccgccctgctctgcaattcactctagaaactggacatccagctgccattgcagtccttgctgtctcaggaacaattctattggtggctgttatcatcttgttttgctttctagcagctgtgccattcgctgctaagaaaacttataaatatgttaagacggttgatgactatgcttcttggcattctcatcagcaaacaccgaccctaggcactatcttttcaggtatcgtctatgcagaatcccaggcgcaattatag

SEQ ID NO: 293 - protein, 175 aa, Chlamydia pneumoniae
VSSTLNGVFPSSLPEESADLFITNKEIVALGEKGNVFLTHSIPMHIAAITILVIVALAGIAIICLGCYSQSILLIAVGIVLTILTLLCLQALVGFIKFIRQLPQQLHTTVQFIREKIRPESSLQLVTNAQRKTTQDTLKLYEELCDLSQKEFKLQSTLYQKRFELSHKNEKTNQN

SEQ ID NO: 294 - DNA, 528 bp, Chlamydia pneumoniae
gtgtctagtactttaaacggggtatttccctcatcccttccggaagagtctgctgatttattcattacgaataaggagatcgtagctttgggggagaagggcaatgtttttctcacccactccattcctatgcatattgctgcgattacgatcttagtgattgtagctcttgctggaatcgctattatctgtttgggttgctatagccaaagcattctgttgattgccgttggcattgttcttactattttgactcttctctgcctacaagccttggtaggatttattaaattcatccggcagctccctcagcagctccatacgacagtacaatttatcagggagaagattcgacctgaatcctctctacagcttgtaaccaatgcacagagaaaaaccactcaagatacgctaaagttatacgaagaactctgcgacctctcacaaaaagagttcaaactgcaatcaactctttatcaaaaacgttttgagctttctcacaagaatgaaaagacaaatcaaaactag

SEQ ID NO: 295 - protein, 158 aa, Chlamydia pneumoniae
MSELAPCSTGLQMVPHTQVHHALDTRRVILTIAACLSLIAGIVLVGLGAAAILPSLFGVIGGMILILFSSIALIYLYKKTREVDQIALEPLPEMISKDQSIIDFVKTRDYASLEKKATFAYTHTHYYDGSMVFYREIPRFMLGSYLALRKDMDRQALF

SEQ ID NO: 296 - DNA, 477 bp, Chlamydia pneumoniae
atgagcgagctcgccccctgctcgacaggattgcagatggtcccccatacgcaggtccatcatgcccttgatacgcggagagtcattctaacgatagccgcctgtctgtctttaattgcaggaatcgtgttggttggcttaggtgctgcagcaatcctgccctcgctttttggagtcattggaggaatgattcttattctgttttcttcgatcgccctcatttatttatacaagaagacaagggaggtggatcagattgctctggagcctcttcctgagatgatttctaaagatcaaagcattatagattttgtaaagacacgagactatgcatctttagaaaagaaagcgacctttgcttatactcatactcattattacgatggaagcatggtcttctatagggagatccctagatttatgttaggctcttatctcgcgcttcgcaaagacatggaccgccaagctcttttttga

SEQ ID NO: 297 - protein, 237 aa, Chlamydia pneumoniae
VISGLLFLLVRREVPTVRSEEIPRGVSVTPSEEPALEKAQKEPETKKILDRLPKELDQLDTYIQEVFACLERLKDPKYEDRGLLTEAKEKLRVFDVVEKDMMSEFLDIQRVLNEEAYYVEHCQDPLENIAYEIFSSQELRDYYCAGVCGYLPSGDARADRLKRSVKEVMDRFMRVTWKSWEASVMLDHSYGVARELFKKAVGVLEESVYKILFKSYRDAFYECEKAKIQRDGRFKWL

SEQ ID NO: 298 - DNA, 714 bp, Chlamydia pneumoniae
gtgatttcgggacttctattccttctagtaagacgagaggttccgacagtacgttcagaggaaattcccagaggggtttctgtgaccccttctgaagagcctgctctagagaaggctcaaaaagaaccggagacaaagaaaattttagatcggttgccgaaggaattggatcagttagatacgtatattcaggaagtgtttgcatgtttagagaggctgaaggatcctaagtacgaagatcgaggtcttttaacagaggcgaaggagaaacttcgagtttttgacgttgttgagaaagatatgatgtcagagtttttagacatacaacgagtgttgaatgaggaagcatattatgtagaacattgtcaagatcccctagagaatatagcctacgagattttctcttcccaagagcttcgtgattactactgtgcaggggtgtgtgggtatttgccttctggggatgctcgagcggatcgattaaagagatcagttaaggaggtaatggatcgctttatgagggtgacctggaaatcttgggaggcatcagtcatgttggatcatagctatggggtagcgcgagagttattcaagaaggcagtaggagtactagaggagagtgtctataaaattctgtttaagagctatagagatgcgttttatgaatgtgagaaggcaaagatccagagggatgggcgtttcaaatggttatag

SEQ ID NO: 299 - protein, 297 aa, Chlamydia pneumoniae
MLLLISGALFLTLGIPGLSAAISFGLGIGLSALGGVLMISGLLCLLVKREIPTVRPEEIPEGVSLAPSEEPALQAAQKTLAQLPKELDQLDTDIQEVFACLRKLKDSKYESRSFLNDAKKELRVFDFVVEDTLSEIFELRQIVAQEGWDLNFLINGGRSLMMTAESESLDLFHVSKRLGYLPSGDVRGEGLKKSAKEIVARLMSLHCEIHKVAVAFDRNSYAMAEKAFAKALGALEESVYRSLTQSYRDKFLESERAKIPWNGHITWLRDDAKSGCAEKKLGMPRNVGRNLGKQSFG

SEQ ID NO: 300 - DNA, 894 bp, Chlamydia pneumoniae
atgctcttactgatttcaggagctctctttctgacgttagggattccaggattgagtgcagcaatttcttttggattaggcatcggtctctccgcattaggaggagtgctgatgatttcgggactactatgtcttttagtaaaacgagagattccgacagtacgaccagaagaaattcctgaaggggtttcgctggctccttctgaggagccagctctacaggcagctcagaagactttagctcagctgcctaaggaattggatcagttagatacagatattcaggaagtgttcgcatgtttaagaaagctgaaagattctaagtatgaaagtcgaagttttttaaacgatgctaagaaggagcttcgagtttttgactttgtggttgaggataccctctcggagattttcgagttgcggcagattgtggctcaagagggatgggatttaaactttttgatcaatgggggacgaagcctcatgatgactgcagaatctgaatcgcttgatttgtttcatgtatcgaagcggctagggtatttaccttctggggatgttcgaggggaggggttaaagaaatctgcgaaggagatagtcgctcgtttgatgagcttgcattgcgagattcacaaggtggcggtagcgtttgataggaattcctatgcgatggcagaaaaggcgtttgcgaaagcgttgggagctttagaagagagtgtgtatcggagtctgacgcagagttatagagataaatttttggagagcgagagggcgaagatcccatggaatgggcatataacctggttaagagatgatgcgaagagtgggtgtgctgaaaagaagctcgggatgccgaggaacgttggaagaaatttaggaaagcagtcttttgggtag

SEQ ID NO: 301 - protein, 107 aa, Chlamydia pneumoniae
MKIKKSFQYSLCQAKRFQNMLPNHFDPCLQPVNLQLKQDRLAYGELIILLSKYQQKTFSSLLKEETCSLNRAKQHLLYKILRDFNTMQHLRSLGLNGWGEIPMSPCL

SEQ ID NO: 302 - DNA, 324 bp, Chlamydia pneumoniae
atgaagattaaaaaatcttttcaatacagtttatgccaagcaaagagatttcagaacatgctgccaaaccactttgatccatgtttgcagccagtgaatttacaactcaaacaagacagattggcatacggggagctcatcatattgctatctaaatatcaacaaaagaccttttcctctttgttgaaggaagaaacatgttctcttaatcgtgcgaagcagcacttattgtataagattttgagagattttaatactatgcagcatctaaggtccctcggattaaatggttggggagagatccctatgagtccttgcctctaa

SEQ ID NO: 303 - protein, 181 aa, Chlamydia pneumoniae; identical to SEQ ID NO: 193

SEQ ID NO: 304 - DNA, 546 bp, Chlamydia pneumoniae; identical to SEQ ID NO: 194

SEQ ID NO: 305 - protein, 223 aa, Chlamydia pneumoniae
MSTTTVKHFIHTASRWEPVLKEIVASNYWHAQWINTLSFLENSGAKKISASEHPTEVKEEVLKHAAEEFRHGHYLKTQISRISETSLPDYTSKNLLGGLLTKYYLHLLDLRTCRVLENEYSLSGQTLKTAAYILVTYAIELRASELYPLYHDILKEAQSKITVKSIILEEQGHLQEMERELKDLPHGEELLGYACQFEGELCLQFVERLEQMIFDPSSTFTKF

SEQ ID NO: 306 - DNA, 672 bp, Chlamydia pneumoniae
atgtctacaaccacagtaaaacactttatccacacagcctctcgttgggagcccgttctcaaagagatcgtagcttccaactattggcatgcacaatggataaataccctgtcctttttagaaaatagtggagcaaaaaaaatctccgcaagtgaacatcctacggaggtaaaggaagaagttttaaaacatgctgctgaagaatttcgtcatggtcactatctaaaaactcagatttctagaatctcagagacttctctccctgactatacatctaaaaatcttctgggaggcttacttacaaaatattacctccatcttctagatttaaggacgtgccgagtactggaaaatgaatactccctatcgggacaaacgttaaaaactgcagcgtatattttagttacctacgcaatcgaacttcgtgcttctgaactttatcctctgtatcacgatattctgaaagaagctcaaagtaaaataacggtaaaatccattatcttagaagagcaaggccatctgcaagagatggaacgtgaacttaaagatctcccccacggggaggaactcttaggctatgcttgccaattcgaaggggagctttgcttgcagtttgtagagagattagaacaaatgatcttcgatccttcctcgacttttacaaagttctag

SEQ ID NO: 307 - protein, 161 aa, Chlamydia pneumoniae
MSSSEVVFQTVHGLGFGGLSSKSVVPFKKSLSDAPRVVCSILVLTLGLGALVCGIAITCWCVPGVILMGGICAIVLGAISLALSLFWLWGLFSNCCGSKRVLPGEGLLRDKLLDGGFSRAAPSGMGLPGDGSPRASTPSCLEELQAEIQAVTQAIDQMSDD

SEQ ID NO: 308 - DNA, 486 bp, Chlamydia pneumoniae
atgagcagttcggaagttgttttccagacagttcatggccttggctttggtggattgtcttcaaaaagtgttgtcccttttaagaaaagtctttcggatgcgccccgtgttgtgtgctcgattttagttttgactctggggttgggagcgcttgtttgtggtattgccattacttgttggtgtgtcccgggagttattttaatggggggaatttgcgctatagttttaggtgcaatttctttagctttaagtctattttggttgtggggtttattttctaattgttgtggttctaagagagttttaccgggtgagggattgctacgggataagcttttagatggtggattttcaagagcggcaccttcaggaatgggacttccgggtgatggatctccaagagcgtcaacgccatcttgcctagaggaacttcaagcagagatacaggcagttactcaagctatcgatcagatgtcagatgattga

SEQ ID NO: 309 - protein, 123 aa, Chlamydia pneumoniae
LRAGGSLVTTYPKEGQRLRSPEQLRVLDDLVQSYPNHLHAIELDCGAIPQDLIGATYIITFADFSTYILSLRSYQANSPSDDTWGIWFGSIDDPVQAVISFLKDHGFALPSTLAQDPLLCTNK

SEQ ID NO: 310 - DNA, 372 bp, Chlamydia pneumoniae
ttgcgagcaggaggtagtcttgttacaacataccctaaggaaggtcagagattgcgctccccagaacagttaagagttctggatgatttagtgcaaagctatccaaatcacctacatgcgattgaacttgattgtggtgcaatccctcaagatttgatcggagccacctatatcatcacgttcgccgatttttccacctatattctctctttaagaagctaccaagccaattctccctccgatgatacatgggggatttggtttggatctattgacgatcctgttcaagcagtcatatcatttttaaaagatcatggatttgctcttccctcgaccttagctcaagatcctttgctttgtactaacaagtaa

SEQ ID NO: 311 - protein, 156 aa, Chlamydia pneumoniae
MIMTTISNSPSPALNPELSLIPPPTLVSSGTQTSLAYTIPAQGRRSTLRIILDIFIIILGLATIISTFIVIFFLNGLNLLSTPSIISSSCLIIVGLLFLIMGLYFMISSLDQGLVGLLQKELSQAEEREEEYIQEIEALRGAPRAESPTESPSTWL

SEQ ID NO: 312 - DNA, 471 bp, Chlamydia pneumoniae
atgattatgactactatatctaactcaccctcccctgcattgaatcccgaactttcccttattcctccaccaacacttgtatcttcaggtacgcaaacatctctagcttatacgatccccgcacaaggacgaagatccaccctacgtattatattagatatattcattatcattcttggtttagctacgatcatttctacctttattgttattttctttttaaatgggctgaacttgctctcgaccccatctattatctcttcgtcatgtttaatcattgttggattgctttttttgattatggggttatatttcatgatctcgagtttggatcaggggcttgtaggccttctgcaaaaggaactctctcaagccgaagaaagagaagaagagtatatccaggaaatcgaagctttaagaggagctcctagagcagaatctcccacagagtctcctagtacctggttatga

SEQ ID NO: 313 - protein, 126 aa, Chlamydia pneumoniae
MLIGRYSSDDQFTEATKNTPTIIKLGFVRDNLEGLTNPISEIVSETSSSIKDSVLRSLPILGSILGCARLYSTLSTNDPLDETQEKIWHTIFGALETLGLGILILLFKIIFVILHCIFHLVIGFCK

SEQ ID NO: 314 - DNA, 381 bp, Chlamydia pneumoniae
atgctaataggcagatacagtagtgatgaccaattcactgaagcaacaaaaaacaccccaaccataattaagctaggttttgttagagataatctcgagggattaacgaaccctatctctgaaatcgtctcggaaacctcctcttctattaaagattccgttcttcgctctcttcctattttagggtccattttaggatgcgcccgactttacagcacactctctacaaatgatcctcttgacgaaactcaagaaaagatttggcacactatatttggagccttagaaaccttaggcttagggattctcatcctcttatttaaaattatttttgttatattacactgcatatttcatctagttattgggttctgcaaataa

SEQ ID NO: 315 - protein, 147 aa, Chlamydia pneumoniae
MKTKMNSRKKAGQWAIFNSPTPGVSSTLVLAWTPWGYYDKDVQDILERKDPMSSSLSEKDSKEFLKNLFVDLLENGFTSVHIHAEEAFTPLDHTGKPHFKRDNVYLPGKLLGALNEAAVQANVSADTQFTLFLTQDECNPFHDKKRG

SEQ ID NO: 316 - DNA, 444 bp, Chlamydia pneumoniae
atgaaaactaaaatgaactctagaaaaaaagcaggtcaatgggcaattttcaattctccaactcctggtgtcagttcaactttagttttagcatggactccttggggttattacgacaaggatgtacaagatatcttagaaagaaaagatccgatgagctcttcgctttctgaaaaagactcaaaggagttcttgaaaaatctgtttgtagatctcttagaaaatggcttcacatcagtacatattcacgcagaagaagctttcactcctcttgatcataccgggaaacctcactttaaaagagacaatgtgtacttacccggaaagttgttaggcgccttgaatgaggctgcggtacaagccaatgtaagtgcggatactcaatttacattgttccttactcaagatgagtgcaatccttttcatgataagaaaagaggttaa

SEQ ID NO: 317 - protein, 65 aa, Chlamydia pneumoniae
LLKFFLVCEELCILTVATHRALLETPLALSFFKELKTKYVYRAKDILQLHNYKGFTILNTSPLCS

SEQ ID NO: 318 - DNA, 198 bp, Chlamydia pneumoniae
ttgctaaagttctttctagtatgtgaagagttatgtatacttactgttgctacacatagagctctcttagaaactcctttagctctatcattttttaaagaacttaagacaaaatatgtctacagggcgaaagacatactacaactacataactataaaggatttactatccttaatacatcaccgttatgttcttaa

SEQ ID NO: 319 - protein, 110 aa, Chlamydia pneumoniae
LWSHFPRGFFMLPFCPTILLAKPFLNSENYGLERLAATVDSYFDLGQSQIVFLSKQDQGITVEELSAKDRKFKPGSMNCTLYTEDPILPAHNSFSNCSDIQMRTPISPIH

SEQ ID NO: 320 - DNA, 333 bp, Chlamydia pneumoniae
ttgtggtcgcatttcccaagaggattttttatgctccctttttgccctaccatccttcttgctaaaccttttttaaatagcgagaattacggcttagaacgtttagctgcaaccgtagattcttattttgatctgggacagtctcaaatagtcttcctaagcaaacaggatcaaggaatcactgtggaagaattgagtgctaaagataggaaattcaagccaggctctatgaactgtacactgtacactgaagatcctatcttacctgctcataattcctttagtaattgctctgatattcaaatgcgtactccgattagccctatacattaa

SEQ ID NO: 321 - protein, 246 aa, Chlamydia pneumoniae
VEAGANVLVIDTAHAHSKGVFQTVLEIKSQFPQISLVVGNLVTAEAAVSLAEIGVDAVKVGIGPGSICTTRIVSGVGYPQITAITNVAKALKNSAVTVIADGRIRYSGDVVKALAAGADCVMLGSLLAGTDEAPGDIVSIDEKLFKRYRGMGSLGAMKQGSADRYFQTQGQKKLVPGGVEGLVAYKGSVHDVLYQILGGIRSGMGYVGAETLKDLKTKASFVRITESGRAESHIHNIYKVQPTLNY

SEQ ID NO: 322 - DNA, 741 bp, Chlamydia pneumoniae
gtggaagctggagcaaatgttctagtcattgacacagctcatgcacactctaaaggagtattccaaacagttttagaaataaaatcccagttcccacaaatttctttagttgtagggaatcttgttacagctgaagccgcagtttccttagctgagattggagttgacgctgtaaaggtaggtattggcccaggatctatctgtacaactagaatcgtttcaggggtcggttatccacaaattactgccattacaaacgtagcaaaagctcttaaaaactctgccgtgactgtaattgctgatgggagaatccgctattctggagatgtggtaaaagcattagcagcaggagcagactgtgtcatgctaggaagtttgcttgcagggactgatgaagctcctggggatatcgtttctatcgatgagaagctttttaaaaggtaccgcggcatgggatctttaggcgctatgaaacaaggaagtgctgaccggtattttcaaacacagggacagaaaaagctggttcctgggggagttgaaggactagtcgcttataaaggctctgtccacgatgtcctctatcaaattttaggaggaatacgctcaggtatggggtatgttggagctgaaactctcaaagatttaaaaactaaggcttcctttgttcgaattactgaatctggaagagctgaaagtcatattcataatatttacaaagttcaaccaaccttaaattattaa

SEQ ID NO: 323 - protein, 159 aa, Chlamydia pneumoniae
LFSEGTALNLFRIFAPLRNRVTTEYSRARQPDLHRIAIVYIGVLDSESSKILERLISYMSCIYSESQMYLRFFMGKNVNQSAVLSKLHVENLHIRCGFFSEDAVPESEPFDLSIYVHTDRSCPLPTKKRSSSWELQTVELPESIYPQSEFLLMRPRMLS

SEQ ID NO: 324 - DNA, 480 bp, Chlamydia pneumoniae
ttgttctctgaggggacagctctaaatttatttcgtatatttgctccactacgcaaccgtgtgactacagaatacagtcgtgctaggcaacccgacctacatagaattgccatcgtctatataggagttctcgattcagaaagttccaagatcctagagcggctaatctcttatatgagttgtatctattctgaatcgcaaatgtatttaagattctttatgggcaagaatgtaaatcaaagtgctgtactctcaaaattacatgtagaaaatctgcacatccgttgtgggtttttcagcgaggatgctgttccagagagtgagcccttcgatctctccatctacgtgcacacagatcgtagctgtcctctccctacgaaaaaacggagcagctcctgggaactccaaactgtagaactcccagagtcaatatatccacagtcggaattcctattgatgagacctcgaatgctttcgtag

SEQ ID NO: 325 - protein, 228 aa, Chlamydia pneumoniae
MRPHRKHVSSKSLALKQSASTHVEITTKAFRLSMPLKQLILEKSDHLPPMETIRVVLTSHKDKLGTEVHVVASHGKEILQTKVHNANPYTAVINAFKKIRTMANKHSNKRKDRTKHDLGLAAKEERIAIQEEQEDRLSNEWLPVEGLDAWDSLKTLGYVPASAKKKISKKKMSIRMLSQDEAIRQLESAAENFLIFLNEQEHKIQCIYKKHDGNYVLIEPSLKPGFCI

SEQ ID NO: 326 - DNA, 687 bp, Chlamydia pneumoniae
atgagacctcatcgtaaacacgtatcatctaaaagcttagctttaaagcaatctgcatcaactcatgtagagatcacaacaaaagcctttcgtctctctatgcctctaaaacagctgatcctagagaaaagcgaccacctcccccctatggaaacaatccgtgtggtgctaacctctcataaagataagctaggcaccgaggtgcatgttgtagcttctcatggcaaagaaatccttcaaactaaggttcataacgcaaacccatacactgcagtgatcaatgcttttaagaaaatccgcaccatggcaaataagcactccaataaacgtaaagacaggacaaaacatgatctaggtcttgcagcaaaagaagaacgtatcgcaatacaggaagaacaagaagatcgccttagcaacgagtggcttcctgtcgaaggcctcgatgcctgggattctctaaaaactcttgggtatgttcccgcatcagcgaaaaagaagatctccaagaaaaagatgagcattcgtatgctatctcaagacgaggctatccgccagctagagtctgccgcagaaaacttcctgatcttcttgaacgagcaagagcataaaatccaatgcatttataaaaaacatgacggcaactatgtccttattgaaccttccctcaagccaggattctgcatctga

SEQ ID NO: 327 - protein, 126 aa, Chlamydia pneumoniae
MEQPNCVIQDTTTVLYALNSFDPRLSDDTHRLGKQSPLEAENALGEFIEGLDTNSFPLEEVAIPILPGYHPKFYLSFIDRDDQGVHYEVLDGVFLKTVAACIIENSFLTDSMSPELLSEVKEALKR

SEQ ID NO: 328 - DNA, 381 bp, Chlamydia pneumoniae
atggagcaacccaattgtgtgattcaggatactacaactgttttgtatgccttaaatagctttgatcctagacttagtgatgacactcacagacttgggaagcaatcacctcttgaagcagaaaatgctcttggagaatttattgaaggtttggatacaaatagctttcctttagaggaagttgccattcccatcctgccaggttatcaccctaagttttatttatctttcatagatagggacgatcaaggtgtccactatgaagttttagatggcgtatttttaaagacagtcgctgcttgtattatagagaactccttcttaactgattctatgagcccggagcttctcagcgaagttaaggaagctctgaaacgatga

SEQ ID NO: 329 - protein, 149 aa, Chlamydia pneumoniae
MAVQSIKEAVTSAATSVGCVNCSREAIPAFNTEERATSIARSVIAAIIAVVAISLLGLGLVVLAGCCPLGMAAGAITMLLGVALLAWAILITLRLLNIPKAEIPSPGNNGEPNERNSATPPLEGGVAGEAGRGGGSPLTQLDLNSGAGS

SEQ ID NO: 330 - DNA, 450 bp, Chlamydia pneumoniae
atggctgttcaatctataaaagaagccgtaacatcagccgcaacatcagtaggatgtgtaaactgttctagagaggctataccagcatttaatacagaggagagagcaacgagtattgctagatctgttatagcagctatcattgctgttgtagctatctccttactcggactaggtcttgtagttcttgctggttgctgtcctttaggaatggctgcgggtgctataacaatgctgctgggtgtagcattattagcttgggcaatactgattactttgagactgcttaatatacctaaggctgaaataccgagtccagggaacaacggtgagcctaatgaaagaaattcagcaactcctcctctagagggtggtgttgcaggagaagccggtcgcggcggggggtcacctttaacccaacttgatctcaattcaggggcgggaagttag

SEQ ID NO: 331 - protein, 234 aa, Chlamydia pneumoniae
MMLRVIELPLLPIKQALEKAFVQYNSYKAKLTKVEPCFRESPAYITSEERLQSLDQTLERAYKEYQKRFQEPSRLESEVSGCREHLREQVKQFETQGLDLIKEELIFVSDVLFRKMVSCLVSTVHVPFMEFYYEYFELHRLRLRAQWMANAEIYSKVRKAFPEMLKETLEKAKAPREEEYWLLCEERKSKEKRLILNKIEAAQQRVKDLEPPPIKETGKQKRKKEYSFFIRLKS

SEQ ID NO: 332 - DNA, 705 bp, Chlamydia pneumoniae
atgatgcttcgtgtcatagagcttccactacttcctataaagcaagcgttggagaaggcttttgtacaatataatagctacaaagcgaagttaaccaaggtagaaccttgctttagagagagccctgcctatataactagcgaagagcgactccagagtttggatcagactttagaacgtgcgtacaaagagtaccagaagagattccaggagccttcacgtttggaatcggaagtaagtggatgtagagagcatcttagagagcaggtaaaacaatttgaaactcaaggactagacttgatcaaagaagagcttatttttgttagtgatgtgttattccgaaaaatggtcagttgtctagtgtcgacagtgcatgttccctttatggagttttattatgagtattttgagttgcatagattgaggttgcgggcccaatggatggcgaatgccgagatttatagcaaagttagaaaagcattcccagagatgttgaaggagaccttagaaaaagctaaggctcccagagaagaagagtattggttactttgcgaggagagaaagagtaaggagaagcgtttgattctcaacaagatagaggcagctcagcagcgggtaaaagatttagaacctcctcctattaaagagacagggaaacagaaacggaagaaagaatattcgtttttcattcgattaaaatcgtga

SEQ ID NO: 333 - protein, 147 aa, Chlamydia pneumoniae
MKKKVTIDEALKEILRLEGAATQEELCAKLLAQGFATTQSSVSRWLRKIQAVKVAGERGARYSLPSSTEKTTTRHLVLSIRHNASLIVIRTVPGSASWIAALLDQGLKDEILGTLAGDDTIFVTPIDEGRLPLLMVSIANLLQVFLD

SEQ ID NO: 334 - DNA, 444 bp, Chlamydia pneumoniae
atgaaaaaaaaagtaactatagatgaggctttaaaagaaattttacgtcttgaaggagcggcaactcaggaggaattatgtgcaaaactcttagctcaaggttttgctacaacccagtcgtctgtatctcgttggctacgaaagattcaggctgtaaaggttgctggagagcgtggtgctcgttattctttaccctcttcaacagagaagaccacgacccgtcatttggtgctctctattcgccataacgcctctcttattgtaattcgtacggttcctggttcagcttcttggatcgctgctttgttagatcaagggctcaaagatgaaattcttggaactttggcaggagatgacacgatttttgtcactcctatagatgaagggaggctcccattgttgatggtttcgattgcaaatttactgcaagttttcttggattaa

SEQ ID NO: 335 - protein, 128 aa, Chlamydia pneumoniae
MSQCQSSSTSTWEWMKSFVPNWKNPTPPLSPIPSEDEFILAYEPFVLPKTDPENAQANPPGTSTPNVENGIDDLNPLLGQPNEQNNANNPGTSGSNPTSLPAPERLPETEENSQEEEQGSQNNEDLIG

SEQ ID NO: 336 - DNA, 387 bp, Chlamydia pneumoniae
atgtctcaatgtcagagtagcagtacatctacctgggaatggatgaaatcttttgtgccaaactggaagaatccaactccccccttatctcctataccttctgaggacgaatttatattagcatacgagccatttgttctaccgaaaacagatccagaaaacgcacaagctaatcctccaggcacatctacaccgaatgtagaaaacgggatcgatgatctcaaccctcttctggggcaacccaacgaacaaaacaatgccaacaatccaggaacttctggatctaatcctacatctctacccgcccccgaacgactccctgaaactgaagagaacagccaagaagaagaacaaggatctcaaaataatgaggatcttataggataa

SEQ ID NO: 337 - protein, 129 aa, Chlamydia pneumoniae
LREEGSVSFREYFRAYMCDKIVAQKNFLFTLDAVIKQAGWRSQEKLNLFYVESQALGREIKVSLEEYIQSMVGILGSQRTKKSFKFSVDFTPLEQALQERCSSDDDEDATATSTATGATASPTDMHEDE

SEQ ID NO: 338 - DNA, 390 bp, Chlamydia pneumoniae
ttgagagaagaaggtagtgtttctttcagagaatatttcagagcctatatgtgtgataaaatcgtggcacagaagaacttcttatttactttagacgctgtaattaaacaggccggttggagatcacaagagaaactcaatttattttatgttgaaagtcaggctttaggaagagaaatcaaagtcagcttagaggaatatattcagagtatggtcgggattttgggatctcagagaaccaagaaaagctttaagttttctgtcgactttacccctttagagcaggctctacaagaaagatgctcttctgatgatgacgaagatgcaacagcaacttcgaccgctacaggggcaacagcatctccgactgacatgcacgaagatgagtaa

SEQ ID NO: 339 - protein, 222 aa, Chlamydia pneumoniae
MLMMLMMIIGITGGSGAGKTTLTQNIKEIFGEDVSVICQDNYYKDRSHYTPEERANLIWDHPDAFDNDLLISDIKRLKNNEIVQAPVFDFVLGNRSKTEIETIYPSKVILVEGILVFENQELRDLMDIRIFVDTDADERILRRMVRDVQEQGDSVDCIMSRYLSMVKPMHEKFIEPTRKYADIIVHGNYRQNVVTNILSQKIKNHLENALESDETYYMVNSK

SEQ ID NO: 340 - DNA, 669 bp, Chlamydia pneumoniae
atgttgatgatgcttatgatgattattggaattacaggaggttctggagctgggaaaaccaccctaacccaaaacattaaagaaattttcggtgaggatgtgagtgttatctgccaagataattattacaaagatagatctcattatactcctgaagaacgtgccaatttaatttgggatcatccggacgcctttgataatgacttattaatttcagacataaaacgtctaaaaaataatgagattgtccaagccccagtttttgattttgttttaggtaatcgatctaaaacggagatagaaacgatctatccatctaaagttattcttgttgaaggtattctggtctttgaaaatcaagaacttagagatcttatggatattaggatctttgtagacaccgatgctgatgaaaggatactacgccgtatggttcgagatgttcaagaacaaggagatagcgtggactgcatcatgtctcgttatctttctatggtaaagcctatgcatgagaaatttatagagccgactcggaaatatgctgatatcattgtacatggaaattaccgacaaaacgtagtaacaaatattttgtcacagaaaattaaaaatcatttagagaatgccctggaaagcgatgagacgtattatatggtcaactctaagtaa

SEQ ID NO: 341 - protein, 117 aa, Chlamydia pneumoniae
VQLFQYMNESGWDWLCDFDSQGEGFQLSRLVGLLHSSWALYEAKEQFYLPEVSLLTWEELIEMQLLSKPTKHGVAKDLCNVFEKHFQRFRQYLGSLDLNQRFENTFLNYPKYHLDRE

SEQ ID NO: 342 - DNA, 354 bp, Chlamydia pneumoniae
gtgcaattatttcaatatatgaatgagtccggatgggattggctttgtgattttgattctcaaggcgagggattccagttatcacgtctggttgggctgttacattcgtcctgggcattatacgaagcaaaagagcaattttaccttcctgaggtttctctattgacctgggaagaactgatagaaatgcagttattaagcaaaccaacaaaacacggggttgcaaaagatctttgtaatgtatttgaaaaacactttcaaaggtttagacagtacctaggttccttagatctaaatcaaaggttcgaaaataccttcttgaattatcctaaataccatttagatagggagtga

SEQ ID NO: 343 - protein, 119 aa, Chlamydia pneumoniae
MPVSSAPLPTSHRPSSGNLGLMEPNSKALKAKHQDKTTKTIKLLVKILVAILVIEVLGIIAAFFIPGTPPICLIILGGLILTTVLCVLLLVIKLALVNKTEGTTAEQQIKRKLSSKSIS

SEQ ID NO: 344 - DNA, 360 bp, Chlamydia pneumoniae
atgcccgtgtcctcagcccccctacccacaagccaccgcccttcctctggaaatctaggcctcatggaaccaaattccaaagctctaaaagcaaagcatcaagataaaacgacgaagacgattaaacttttagttaaaatccttgttgccattctagtaatagaagttttaggaataattgcagctttctttattcctgggactcctcccatctgcttgattatcctaggaggccttattcttacaacagtactctgtgtgcttcttcttgttataaagcttgcccttgtaaacaaaaccgaaggaacaactgctgaacagcagataaaacgtaaactctcttctaaaagtatttcttag

SEQ ID NO: 345 - protein, 80 aa, Chlamydia pneumoniae
MKPNSIIFLENTKHYPDIFREGFVRDRHGLMEASDWLLSTEITIIRSILGAIPILGNILGAGRLYSVWYTSDEDWKKQVV

SEQ ID NO: 346 - DNA, 243 bp, Chlamydia pneumoniae
atgaagccaaatagtattatttttttagaaaatactaagcattatcccgacatctttcgagaaggatttgttcgtgatcgtcatggactaatggaagcctcggattggttactttctacggaaattacgatcattcgctccattctgggagctatccctattttaggaaatattcttggagccggacgactctatagcgtttggtatacaagtgacgaagattggaaaaaacaagtggtttga

SEQ ID NO: 347 - protein, 181 aa, Chlamydia pneumoniae
MPVPIDNSSRNLQEVPESLEDLEQHAEESPTHQSAESSSLQLSLASSAISSRVEQLSSLVLGMENSDFSSLRDVPIFSAIYESSTHTPVPTPLVGVGYINGSQSGYYDTQRESLHLSQLLGSRRVEVVYNQGNFMEASLLNLCPRRPRRDPSPISLALLELWEAFFLEHPPGSTFNPIFFW

SEQ ID NO: 348 - DNA, 546 bp, Chlamydia pneumoniae
atgcccgttcctatagataattcctctcgcaacctacaagaagttccagaaagcctagaagacctcgaacaacacgcagaagaatctcctactcatcaaagtgcagaaagcagttctttgcaactgtctctagcctcctcagcaatttctagtagagtagaacaactatcttccctcgtcttaggaatggaaaattcagatttctcctctttaagagacgttcctatcttctcagctatctacgaatcttcaacacacacacctgtccccactcctctagttggcgtgggatatatcaacggaagtcaatcaggatactacgatacacaaagagaatctcttcacctcagccaattgttaggaagccgaagagttgaagttgtctataaccaaggaaacttcatggaggcctctttgctaaatctgtgccccagaagacctcgaagagatccctctccaatttctttagctctattagagctctgggaagcattttttttagaacaccccccaggtagcacttttaatccaatatttttttggtaa

SEQ ID NO: 349 - protein, 133 aa, Chlamydia pneumoniae
LNFVSTLTGSDFYAPVLEKLEEAFADTTGQVILFSSSPDFIVHPIAQQLGISSWYASCYRDQSAEQTIYKKCLTGDKKAQILSYIKKINQARSHTFSDHILDLPFLMLGEEKTVVRPQGRLKKMAKKYYWNIV

SEQ ID NO: 350 - DNA, 402 bp, Chlamydia pneumoniae
ttgaattttgtatcgactctgaccggctccgatttttatgctcctgttttagaaaaactagaagaagcttttgcagataccacaggacaggtgatccttttttcttcttctccagactttattgtccaccccatagcgcagcaactcgggattagttcttggtatgcgtcgtgttatcgcgatcagtctgcagaacagacgatctataaaaaatgtcttacaggggataaaaaagcgcaaattttgagttatattaaaaaaattaatcaagcaagaagccataccttctccgaccatattttagatcttccttttcttatgctgggagaagagaaaaccgtcgttcgccctcagggacgactcaagaaaatggcaaaaaaatattactggaatatcgtttaa

SEQ ID NO: 351 - protein, 162 aa, Chlamydia pneumoniae
MMHRYFIPLLALLIFSPSLVRAELQPSENRKGGWPTQLSCAEGSQLFCKFEAAYNNAIEEGKPGILVFFSERPTPEFADLTNGSFSLSTPIAKGFNVVVLCPGLISPLDFFHKMDPVILYMGSFLEMFPEVEAVSGPRLCYILIDEQGGAQCQAVLPLETKN

SEQ ID NO: 352 - DNA, 489 bp, Chlamydia pneumoniae
atgatgcaccgttattttattcctttattagcacttctcattttctctccttctttagtcagggcagagctacaaccaagtgaaaacagaaaaggggggtggcctacacaactttcctgtgcagaaggttcgcaactcttctgtaaattcgaagctgcctataataatgcaattgaggaagggaaacctgggattttagtctttttctctgagcgacccacaccagaatttgccgacttaacgaatggttcattttctctctctacgccaatcgccaagggctttaatgtcgttgtgttatgccccgggcttatcagtcccttagactttttccacaaaatggatcctgtgattctctatatgggaagttttctagagatgttccctgaagtggaggcagttagtggccctcgcttatgttatatcttaatagatgaacagggtggggctcaatgtcaggctgtcctgcctttagaaacaaagaattag

SEQ ID NO: 353 - protein, 219 aa, Chlamydia pneumoniae
MQRIIIVGIDTGVGKTIVSAILARALNAEYWKPIQAGNLENSDSNIVHELSGAYCHPEAYRLHKPLSPHKAAQIDNVSIEESHICAPKTTSNLIIETSGGFLSPCTSKRLQGDVFSSWSCSWILVSQAYLGSINHTCLTVEAMRSRNLNILGMVVNGYPEDEEHWLTQEIKLPIIGTLAKEKEITKTIISCYAEQWKEVWTSNHQGIQGVSGTPSLNLH

SEQ ID NO: 354 - DNA, 660 bp, Chlamydia pneumoniae
atgcaacgtatcatcattgtaggaatcgacactggcgtaggaaaaaccattgtcagtgctatccttgctagagcacttaacgcagaatactggaaacctatacaagcagggaatctagaaaattcagatagcaatattgttcatgagctatcgggagcctactgtcatcccgaagcttatcgattgcataagcccttgtctccacacaaggcagcgcaaatcgataatgtaagtatcgaagagagtcatatttgtgcgccaaaaacaacttcgaatctgattattgagacttcaggaggatttttatccccctgcacatcaaaaagacttcagggagatgtgttttcttcttggtcatgttcttggattttagtgagccaagcatatctcggaagtatcaatcacacctgtttaacggtagaagcaatgcgctcacgaaacctcaatatcttaggtatggtggtaaatgggtatccagaggacgaagagcactggctaactcaagaaatcaagcttcctataatcgggactcttgccaaggaaaaagaaatcacaaagacaatcataagctgttatgccgaacaatggaaggaagtatggacaagcaatcatcagggaattcagggtgtatctggcaccccttcactcaatctgcattag

SEQ ID NO: 355 - protein, 811 aa, Chlamydia pneumoniae
MQVLLSPQLPPPPQHSVGSISSPSKLRVLAITFLVFGMLLLISGALFLTLGIPGLSAAISFGLGIGLSALGGVLMISGLLCLLVKREIPTVRPEEIPEGVSLAPSEEPALQAAQKTLAQLPKELDQLDTDIQEVFACLRKLKDSKYESRSFLNDAKKELRVFDFVVEDTLSEIFELRQIVAQEGWDLNFLINGGRSLMMTAESESLDLFHVSKRLGYLPSGDVRGEGLKKSAKEIVARLMSLHCEIHKVAVAFDRNSYAMAEKAFAKALGALEESVYRSLTQSYRDKFLESERAKIPWNGHITWLRDDAKSGCAEKKLRDAEERWKKFRKAVFWVEEDGGFDINNLLGDWGTVLDPYRQERMDEITFHELYEKTTFLKRLHRKCALAKTTFEKKRSKKNLQAVEEANARRLKYVRDWYDQEFQKAGERLEKLHALYPEVSVSIRENKIQETRSNLEKAYEAIEENYRCCVREQEDYWKEEEKREAEFRERGNKILSPEELESSLEQFDHGLKNFSEKLMELEGHILKLQKEATAEVENKILSDAESRLEIVFEDVKEMPCRIEEIEKTLRMAELPLLPTKKAFEKACSQYNSCAEMLEKVKPYCKESLAYVTSKERLVSLDEDLRRAYTECQKRFQGDSGLESEVRACREQLRERIQEFETQGLDLVEKELLCVSSRLRNTECDCVSGVKKEAPPGKKFYAQYYDEIYRVRVQSRWMTMSERLREGVQACNKMLKAGLSEEDKVLKEEEYWLYREERKNKEKRLVGTKIVATQQRVAAFESIEVPEIPEAPEEKPSLLDKARSLFTREDHT

SEQ ID NO: 356 - DNA, 2436 bp, Chlamydia pneumoniae
atgcaagtacttctatctccgcagctacccccccccccccaacactctgtagggtcgatttcttctccatctaaacttcgcgttttagcgattacttttttagtttttggtatgctcttactgatttcaggagctctctttctgacgttagggattccaggattgagtgcagcaatttcttttggattaggcatcggtctctccgcattaggaggagtgctgatgatttcgggactactatgtcttttagtaaaacgagagattccgacagtacgaccagaagaaattcctgaaggggtttcgctggctccttctgaggagccagctctacaggcagctcagaagactttagctcagctgcctaaggaattggatcagttagatacagatattcaggaagtgttcgcatgtttaagaaagctgaaagattctaagtatgaaagtcgaagttttttaaacgatgctaagaaggagcttcgagtttttgactttgtggttgaggataccctctcggagattttcgagttgcggcagattgtggctcaagagggatgggatttaaactttttgatcaatgggggacgaagcctcatgatgactgcagaatctgaatcgcttgatttgtttcatgtatcgaagcggctagggtatttaccttctggggatgttcgaggggaggggttaaagaaatctgcgaaggagatagtcgctcgtttgatgagcttgcattgcgagattcacaaggtggcggtagcgtttgataggaattcctatgcgatggcagaaaaggcgtttgcgaaagcgttgggagctttagaagagagtgtgtatcggagtctgacgcagagttatagagataaatttttggagagcgagagggcgaagatcccatggaatgggcatataacctggttaagagatgatgcgaagagtgggtgtgctgaaaagaagcttcgggatgccgaggaacgttggaagaaatttaggaaagcagtcttttgggtagaagaagacgggggctttgacatcaataatctccttggagactgggggacagtgcttgatccttatagacaagagagaatggacgagataacgttccatgagttgtatgaaaaaactacgtttttgaaaagactgcacagaaagtgtgcgttagcgaaaacaacctttgaaaagaagagatctaaaaagaatttgcaggcagtcgaggaggcgaatgcacgtaggttgaaatatgtaagggattggtatgatcaggagtttcagaaagcaggggagagattagagaaactgcatgctttgtatcctgaggtttcagtctctataagagagaacaaaatacaagagacgcgctctaatttagagaaagcctatgaggctatcgaagagaactatcgttgctgtgtccgagagcaagaggactactggaaagaagaagagaaaagggaagcggagtttagggagaggggaaacaagattctttctcctgaggagctggaaagttctttggagcaattcgaccatggtttgaaaaatttttctgagaaattaatggaattggaagggcatatcttaaaacttcagaaagaagccacagcagaggtggagaataaaatactttcagatgcagagagccgccttgagattgtatttgaagatgtcaaggagatgccctgtcgaattgaggagatagagaagacgctgcgtatggcggagctgcccctacttcctacgaagaaggcgtttgagaaggcctgctcacaatataatagctgcgcagagatgttggagaaggtgaagccttactgcaaggagagcctcgcctatgtgactagcaaagagcgtttagtgagcttggatgaagatttacgacgagcctacacagagtgtcagaagagattccagggggattcgggtttggagtcggaagtaagagcctgtcgagagcaactgcgagagcggatccaagagtttgaaactcaagggctggacttggtggaaaaagagttgctttgtgtgagtagtagattaagaaatacagagtgcgattgtgtatctggtgttaagaaagaagcacctcctggtaagaagttttatgcccagtattatgatgagatttatcgagttagagttcaatcccgatggatgacgatgtctgagagattgagagagggagttcaagcatgcaacaagatgttgaaggcaggcctaagcgaagaagataaggttcttaaagaagaagagtattggttgtatcgagaggagagaaagaataaagagaaacgtttggttggtactaagatagtagcaacgcagcagcgagttgcagcatttgaatccatagaagttcctgagattcctgaggccccagaggagaaaccgagtttgctggataaagcgcgttctttatttactcgcgaggaccatacctag

SEQ ID NO: 357 - protein, 212 aa, Chlamydia pneumoniae
MATSVAPSPVPESSPLSHATEVLNLPNAYITQPHPIPAAPWETFRSKLSTKHTLCFALTLLLTLGGTISAGYAGYTGNWIICGIGLGIIVLTLILALLLAIPLKNKQTGTKLIDEISQDISSIGSGFVQRYGLMFSTIKSVHLPELTTQNQEKTRILNEIEAKKESIQNLELKITECQNKLAQKQPKRKSSQKSFMRSIKHLSKNPVILFDC

SEQ ID NO: 358 - DNA, 639 bp, Chlamydia pneumoniae
atggcaacttccgtagccccatcaccagtccccgagagcagccctctctctcatgctacagaagttctcaatcttcctaatgcttatattacgcagcctcatccgattccagcggctccttgggagacctttcgctccaaactttccacaaagcatacgctctgttttgccttaacactactgttaaccttagggggaacgatctcagcaggttacgcaggatatactggaaactggatcatctgtggcatcggcttgggaattatcgtactcacactgattcttgctcttcttctagcaatccctcttaaaaataagcagacaggaacaaaactgattgatgagatatctcaagacatttcctctataggatcaggatttgttcagagatacgggttgatgttctctacaattaaaagcgtgcatcttccagagctgacaacacaaaatcaagaaaaaacaagaattttaaatgaaattgaagcgaaaaaggaatcgatccaaaatcttgagcttaaaattactgagtgccaaaacaagttagcacagaaacagccgaaacggaaatcatctcagaaatcatttatgcgtagtattaagcacctctccaagaaccctgtaattttgttcgattgctga

SEQ ID NO: 359 - protein, 114 aa, Chlamydia pneumoniae
MSYYFSLWYLKVQQHFQAAFDFTRSLCSRISNFALGVIALLPIIGQLYVGLDWLLSRIKKPEFPSDVDQIVRVEHVVGHDHRSRVEDILKRQRLSLEPRDEGKVHGDLPSAPFF

SEQ ID NO: 360 - DNA, 345 bp, Chlamydia pneumoniae
atgagttattacttttctctttggtatctgaaggtgcaacagcactttcaagcagcatttgattttactcgctccctgtgttcacgaatttctaattttgctttgggagtgattgcattgcttcctattattgggcagttgtatgtagggctggactggctcctctctaggataaaaaagccagaatttccttccgatgtggatcagatcgtgcgagtagaacacgtcgtgggtcacgaccatagaagtcgagttgaagatattctaaagagacaaaggctctcattagagcctagagacgaggggaaggttcacggagatctgccttcagctccttttttttga

SEQ ID NO: 361 - protein, 158 aa, Chlamydia pneumoniae
LNQDLQNVYQECQKATGLESEVSAYRDHLREQITEFETQGLDVIKEELLFVSSTLKSKLSYDPLIADIPCMKFYEEYYDGIDKARVQSRWLEKSERYRKAKKGFQEMLKEGLFKEDQALKKAEYRLLREKRMNKEKLLICNKIEAAQQRVQEFGPSDS

SEQ ID NO: 362 - DNA, 477 bp, Chlamydia pneumoniae
ttgaatcaggatttacaaaatgtataccaagagtgccagaaggctacaggtttagaatcggaagtgagtgcatatagagatcatcttagagagcagatcacagagtttgaaactcaagggctggacgtgataaaagaagaacttctttttgtgagtagtactctcaaaagtaaattgagctatgatccattaatagcagacattccctgtatgaagttttatgaggagtattatgatggcattgataaagcgagagttcaatcccgatggctggagaagtctgagaggtatagaaaggcgaagaagggattccaagagatgctgaaggaaggcctattcaaagaagatcaggctttgaaaaaagcagagtatagattacttcgagagaagagaatgaataaggagaagcttttgatttgcaataagatagaagcagctcagcagcgagtccaagaatttggaccctcggattcataa

SEQ ID NO: 363 - protein, 165 aa, Chlamydia pneumoniae
MNIPAPQVPVIDEPVVNNTSSYGLSLKSSLRPITYLILAILAIATLMSVLYFCGIISVGTFVLGMLIPLSVCSVLCVAYLFYQQSSIEKTKVFSITSPSVFFSDEDLNLLLGREEDSVSAIDELLKNFPADDFRRPKMLPYSNFLDEQGRPNESREEDSHTSKIL

SEQ ID NO: 364 - DNA, 498 bp, Chlamydia pneumoniae
atgaacatacccgctccccaagtaccagtcatagatgagcctgtagtgaacaacacaagtagctatggtctttcattgaaaagtagtttaagaccgattacttatttgattttagctatcttagctatagccacactgatgtctgttctctacttttgtggcatcattagtgttgggacgtttgttttgggcatgctgatccctctatcggtctgctctgttctttgcgttgcctatttattctatcagcaatcttctatagaaaagactaaggtcttttctataaccagtccttcagtatttttctctgatgaggatcttaatttactcttaggtcgagaagaagattcagtgtctgcaattgatgaacttcttaagaactttccagctgatgatttccgtaggccgaagatgcttccttattcaaattttctagatgagcagggaaggcctaatgagagtagggaagaagactctcatacttccaagatcttataa

SEQ ID NO: 365 - protein, 433 aa, Chlamydia pneumoniae
MSMTIVPHALFKNHCECHSTFPLSSRTIVRIAIASLFCIGALAALGCLAPPVSYIVGSVLAFIAFVILSLVILALIFGEKKLPPTPRIIPDRFTHVIDEAYGLSISAFVREQQVTLAEFRQFSTALLCNISPEEKIKQLPSELRSKVESFGISRLAGDLEKNNWPIFEDLLSQTCPLYWLQKFISAGDPQVCRDLGVPRECYGYYWLGPLGYSTAKATIFCKETHHILQQLTKEDVLLLKNKALQEKWDTDEVKAIVERIYTTYTARGTLKTEAGGLTKETISKELLLLSLHGYSFDQLQLITQLPRDAWDWLCFVDNSTAYNLQLCALVGALSSQNLLDESSIDFDVNLGLYVIQDLKEAVQAFSASDEPKKELGKFLLRHLSSVSKRLESVLRQGLHRIALEHGNARARVYDVNFVTGARIHRKTSIFFKD

SEQ ID NO: 366 - DNA, 1302 bp, Chlamydia pneumoniae
atgagcatgacgatcgttccacatgctttatttaaaaatcattgcgagtgtcattctacctttcctttgagttcaaggactattgtaagaatagccattgccagcctcttttgtataggtgcattagcagctttaggctgtttggctcctcccgtttcttatattgttgggagtgttttagcttttattgcctttgtcattctttctttagtaattttagctttgatttttggagagaagaagcttccaccaacaccaagaatcattcctgatagatttactcacgtgatagatgaagcttatggcctttcaatctctgcatttgtaagagaacagcaggtaacattagccgagtttagacaattttctactgccctgttgtgtaacatatctcctgaagagaaaatcaaacaattgccttctgaattgcgaagtaaagtagagagttttggtattagcaggctcgcaggtgatttagaaaagaataattggccaatatttgaagatcttttaagccaaacctgcccgttatattggcttcagaaatttatatcagcaggagatccacaagtttgtagagacctaggtgtccctagagaatgttatgggtactattggctagggcctttgggatacagtacagctaaggctacaattttttgtaaagagacgcatcatattcttcaacaattaacgaaagaggacgttcttttattaaaaaacaaggctcttcaagagaaatgggatactgatgaagtcaaagcaattgtagagcgtatctacactacctatacggcacgaggaactctaaagaccgaagcagggggacttacaaaagagacaatcagtaaggaattgctattgttgagcttgcatggctattcttttgatcagctacagctgatcactcaacttcctagagatgcttgggattggctgtgttttgtagataacagtaccgcatacaaccttcagctttgtgctcttgtaggagctttgtcatcccaaaatcttcttgacgaatcttctatcgattttgatgtaaacctaggcctgtatgtgattcaggatctaaaagaagctgttcaagcattttctgcttctgatgagccaaagaaagaactaggtaaattcttgttaaggcatttgagttcagtttctaagcgattagagagtgtattaagacagggtcttcacagaatagctctagagcatggaaatgccagagctagggtttatgacgtcaattttgtaacaggagctagaattcataggaagacgagtatcttctttaaagactaa

SEQ ID NO: 367 - protein, 283 aa, Chlamydia pneumoniae
MVNIQPVYRNTQVNYSQATQFSVCQPALSLIIVSVVAAVLAIVALVCSQSLLSIELGTALVLVSLILFASAMFMIYKMRQEPKELLIPKKIMELIQEHYPSIVVDFIRDQEVSIYEIHHLISILNKTNVFDKAPVYLQEKLLQFGIEKFKDVHPSKLPNFEEILLQHCPLHWLGRLVYPMVSDVTPGTYGYYWCGPLGLYENAPSLFERRSLLLLKKISFGEFALLEDGLKKNTWSSSELVQIRQNLFTRYYADKEEVDEAELNADYEQFDSLLHLIFSHKLS

SEQ ID NO: 368 - DNA, 852 bp, Chlamydia pneumoniae
atggttaatatacagcctgtgtataggaatacccaagtcaactatagtcaggctacccaattttcggtgtgccagccagcgcttagcctgattatcgtttctgttgttgctgctgtactcgctattgtagctttggtatgcagtcaatctcttttatccatagagttaggaactgctcttgttctagtttctcttattctttttgcttctgctatgtttatgatttataagatgagacaagaacctaaggagttgctgatccctaagaaaatcatggaactcatccaagaacattatccaagtattgttgttgattttattagagatcaggaggtttccatttatgagatacatcacttgatctctattcttaataagacgaatgttttcgacaaagcaccagtatatttacaagaaaaactcttacagtttggcattgagaagttcaaagatgtacatccaagtaagctccctaattttgaagaaattcttctacagcattgcccattgcattggttgggacgtctggtatatcccatggtatcggatgtcactccaggaacctatggatactattggtgtggtcctttaggactgtacgagaacgctccctctctttttgaacgtcgatctcttctattgttaaagaaaattagctttggagagtttgctcttttagaagatggtctcaagaaaaacacgtggagttcttcggaactcgttcaaatcagacaaaacctttttacaagatattatgctgataaagaagaggtagatgaagcagagttaaacgctgattacgaacagtttgattccctccttcaccttattttttctcacaagctctcttga

SEQ ID NO: 369 - protein, 339 aa, Chlamydia pneumoniae
MATISPISLTVDHPLVDTKKKSCSNFDKIQSRILLITAIFAVLVTIGTLLIGLLLNIPVIYFLTGISFIAVVLSNFILYKRATTLLKPRACGKHKEIKPKRVSTNLQYSSISIAINRSKENWEHQPKDLQNLPAPSALLTDNPYEIWKAKHSLFSLVSLLPGGNPEHLLISASENLGKTLLIEETSQNAPISSYVDTTPSPKSLLNEAIQETRVEINTELPAGDSGERLYWQPDFRGRVFLPQIPTTPEAIYQYYYALYVTYIQTAINTNTQIIQIPLYSLREHLYSRELPPQSRMQQSLAMITAVKYMAELHPEYPLTIACVERSLAQLPQESIEDLS

SEQ ID NO: 370 - DNA, 1020 bp, Chlamydia pneumoniae
atggctacaatctcacccatatctttaactgtagatcatcccctagtagacactaaaaaaaaatcctgcagcaactttgataagattcagtctcgaattctattgattactgcaatctttgctgtcttagttactatagggaccctacttattggtttgcttttaaatattcctgttatctatttcctcacaggaatttcatttattgctgttgttcttagcaactttatcctttataaacgagcaaccaccctcttaaaaccgcgtgcttgtggcaaacacaaagaaataaaaccaaaaagggtctccaccaacctacagtattcttctatctctatcgcaatcaatcgttctaaagaaaactgggaacaccaacccaaggacctacagaatctccccgcaccctctgcattactcacagataacccttacgagatatggaaagctaaacattcactgttttccctagtatccctcctaccgggaggcaatccagaacatctcttaatttcagcttccgaaaatttaggaaagactctgttaattgaagaaacctcgcaaaatgcgcctatatcctcctacgtagataccactccctccccaaaatccttgctcaatgaggcaattcaggaaaccagggtagaaataaatacagaactccctgcgggagattcaggagaacgtttatactggcaacccgatttccgaggccgcgtcttcctcccacaaataccaacaactcctgaagccatctaccaatactactatgcactctatgtcacttatatccagactgcgatcaatacgaacacccaaattatccaaatccctttatacagcttgagggagcatctctattctagagaattgcccccgcaatcaagaatgcaacaatctttggctatgattacagcagtaaaatacatggccgagctgcacccagaatatccgctaactattgcttgtgttgaaagatccttagcccaactacctcaagaaagtattgaggatctctcttag

SEQ ID NO: 371 - protein, 170 aa, Chlamydia pneumoniae
MSEVKPLFLKNDSFDLATQRFQNLINMLQEQAEIYNEYEEKNARVQNEIKEQKDFVKRCIEDFEARGLGVLKEELASLTRDFHDKAKAETSMLIECPCIGFYYSIHQEEQRQRQERLQKMAERYRDCKQVLEAVQVEQKDMISSRVVVDDSYFEEEKEEQKVDNRKKEQD

SEQ ID NO: 372 - DNA, 513 bp, Chlamydia pneumoniae
atgtcagaagtgaagcctttgtttttaaagaatgactcttttgatttggcaactcagagattccagaatctaattaacatgctacaagagcaagccgagatatataacgagtatgaagaaaagaatgctagggttcagaatgagattaaggagcaaaaggactttgtgaaaagatgcatagaggactttgaagccagaggactgggggtgctaaaagaagagcttgcatctttgacgcgtgatttccatgataaagcaaaagcagagacttctatgctcattgaatgtccttgtattggtttttattatagtattcatcaggaggaacaaaggcaaaggcaagaaaggcttcaaaagatggctgagcgctatagggactgtaaacaagtcttggaggctgtccaggtggagcaaaaagatatgatatcttctagagtcgttgtcgatgacagctactttgaagaagaaaaagaagaacaaaaggtggataacagaaagaaagaacaggactag

SEQ ID NO: 373 - protein, 196 aa, Chlamydia pneumoniae
VLQEHFFLSEDVITLAQQLLGHKLITTHEGLITSGYIVETEAYRGPDDKACHAYNYRKTQRNRAMYLKGGSAYLYRCYGMHHLLNVVTGPEDIPHAVLIRAILPDQGKELMIQRRQWRDKPPHLLTNGPGKVCQALGISLENNRQRLNTPALYISKEKISGTLTATARIGIDYAQEYRDVPWRFLLSPEDSGKVLS

SEQ ID NO: 374 - DNA, 591 bp, Chlamydia pneumoniae
gtgctacaagaacatttttttctatcggaagatgtaattacactagcgcaacagcttttaggacataaactcatcacaacacatgagggtctgataacttcaggttacattgtagaaaccgaagcgtatcgtggccctgatgacaaagcatgccacgcctacaactacagaaaaactcagaggaacagagcgatgtacctgaaaggaggctctgcttacctctaccgttgctatggcatgcatcacctattgaatgttgtcactggacctgaggacattccccatgccgtcctgatccgggccatccttcctgatcaaggcaaagaacttatgatccaacgccgccaatggagagataaacccccacaccttctcaccaatggacccggaaaagtgtgccaagctctaggaatctctttggaaaacaataggcaacgcctaaataccccagctctctatatcagcaaagaaaaaatctctgggactctaacagcaactgcccggatcggcatcgattatgctcaagagtatcgtgatgtcccatggagatttctcctatccccagaagattcgggaaaagttttatcttaa

SEQ ID NO: 375 - protein, 184 aa, Chlamydia pneumoniae
MVETVLHNFQRYLSKYLYRVFRFPCRKKTFLSSHRVLARPSFPVDYCPGKIYDLQEIYEELNAQLFQGALRLQIGWFGRKATRKGKSVVLGLFHENEQLIRIHRSLDRQEIPRFFMEYLVYHEMVHSVVPREYSLSGRSIFHGKKFKEYEQRFPLYDRAVAWEKANAYLLRGYKKRVGGGYGRA

SEQ ID NO: 376 - DNA, 555 bp, Chlamydia pneumoniae
atggttgaaacagtacttcataatttccaacgttatctgagcaagtatctctatagggtatttcgcttcccatgtcgtaaaaagacgttcctatcttcgcacagggttcttgctcgtccttcattcccagtagactactgtccgggaaagatctatgatttgcaggagatctatgaggaattgaatgcgcagttatttcaaggtgcactgcgtttacagattggttggttcggaaggaaagctaccagaaaaggcaagagtgttgtcttgggattgtttcatgaaaatgaacagttaattcgaattcatcgttctttagatcggcaggaaatcccaagattttttatggaatatcttgtgtatcatgaaatggttcatagtgtagtccctagagagtattctctatcggggcgttcgatttttcatggtaaaaagtttaaagaatacgaacaacgtttccccttgtatgatcgtgctgttgcttgggaaaaggcaaacgcttatttattgcgagggtataaaaaaagagtaggtggaggatatggcagggcatag

SEQ ID NO: 377 - protein, 707 aa, Chlamydia pneumoniae
MYKRCVLDKILKGIVAGSLILLYWSSDLLERDIKSIKGNVRDIQEDIREISRVVKQQQTSQAIPAAPGVMLAPKLVRDEAFALLFGDPSYPNLLSLDPYKQQTLPELLGTNFHPHGILRTAHVGKPENLSPFNGFDYVVGFYDLCIPSLASPHVGKYEEFSPDLAVKIEEHLVEDGSGDKEFHIYLRPNVFWRPIDPKALPKHVQLDEVFQRPHPVTAHDIKFFYDAVMNPYVATMRAVALRSCYEDVVSVSVENDLKLVVRWKAHTVINEEGKEERKVLYSAFSNTLSLQPLPRFVYQYFANGEKIIEDENIDTYRTNSIWAQNFTMHWANNYIVSCGAYYFAGMDDEKIVFSRNPDFYDPLAALIDKRFVYFKESTDSLFQDFKTGKIDISYLPPNQRDNFYSFMKSSAYNKQVAKGGAVRETVSADRAYTYIGWNCFSLFFQSRQVRCAMNMAIDRERIIEQCLDGQGYTISGPFASSSPSYNKQIEGWHYSPEEAARLLEEEGWIDTDGDGIREKVIDGVIVPFRFRLCYYVKSVTAHTIADYVATACKEIGIECSLLGLDMADLSQAFDEKNFDALLMGWCLGIPPEDPRALWHSEGAMEKGSANVVGFHNEEADKIIDRLSYEYDLKERNRLYHRFHEIIHEEAPYAFLFSRHCSLLYKDYVKNIFVPTHRTDLIPEAQDETVNVTMVWLEKKEDPCLSTS

SEQ ID NO: 378 - DNA, 2124 bp, Chlamydia pneumoniae
atgtataaaagatgtgtgctagataaaattttaaaggggattgtcgccggttctttaattttgttatactggtcctcagacctacttgaaagagacattaagtcgataaaaggtaacgtaagagatattcaagaagacattcgtgaaatctcacgcgtagtgaaacaacagcagacatcacaagctatccctgcggcacctggggtgatgctcgctcctaagctcgtcagagacgaagcttttgctctactctttggagatcctagttatcctaatttactttccctagacccctataaacagcagactcttcctgaacttctaggaacaaatttccaccctcatggtatcctacgcactgcccatgtcggaaaacccgaaaatctgagcccttttaatggctttgattatgtcgtgggcttttacgatctctgtattcctagtttagcttctccccacgtagggaaatacgaagaattttctccagatctcgctgtgaaaatagaagaacatcttgttgaagatggttctggggataaagagtttcacatctatctgaggccgaatgttttttggcgtcctatagatcctaaggcccttccaaaacacgttcagttagacgaagtatttcaacgtcctcatcctgtgacagctcatgatattaagtttttctacgacgctgttatgaacccttatgtagcaaccatgcgagcagtggctctgcgctcttgttatgaagatgtggtttctgtctcagtagaaaacgatttaaaattagtagtcagatggaaagcacacacggtaatcaatgaagaaggaaaggaagagcgcaaagtgctctactctgcattttctaataccttaagcttgcagcccctccctagatttgtatatcagtattttgctaacggggaaaaaatcattgaagatgagaatatcgatacctaccgaaccaattccatttgggcgcaaaacttcactatgcattgggcaaacaactatattgtaagttgtggagcctactactttgcagggatggatgatgagaaaatcgtgttttctagaaatcctgacttctatgatcctcttgcggctcttattgacaagcgtttcgtctattttaaggaaagcacagactccctattccaagattttaagacagggaaaatagacatctcttaccttccacccaaccaaagagataatttctatagttttatgaaaagctccgcttataacaaacaggtagctaagggaggagccgtccgtgaaacagtctcagcagatcgagcatatacgtacataggatggaattgcttttcattatttttccaaagccgacaggtgcgctgtgctatgaacatggcaatcgatagagagaggattatcgaacagtgcttggatggccaaggctatacgattagtgggccttttgcttcgagttctccttcttataataaacagatcgaagggtggcattattctccagaagaagcagctcgtctcctggaagaagagggatggatagataccgatggcgatggaatccgagaaaaagttatcgatggtgtgattgtcccgttccgtttccgtttatgctattatgtaaagagtgtcaccgctcataccattgcagattacgtagctactgcttgtaaggaaatcggaatcgagtgtagccttctaggactagatatggccgatctttcgcaagcttttgatgaaaagaatttcgatgctcttttaatgggatggtgtttaggaattcctcctgaggatcctagggctttatggcattctgaaggggctatggaaaagggttcagcgaatgttgtaggtttccataatgaagaagctgataaaatcatagacagactcagctacgaatacgatctgaaagaacgtaatcgcctgtaccaccgtttccatgaaattattcatgaggaagctccttatgctttcttgttctcacgacattgttccttactttataaggattatgtaaaaaatattttcgtacctacacatagaacagatttaattcctgaagctcaggatgagactgtcaacgtaactatggtatggcttgagaagaaggaggatccgtgcttaagtacatcctaa

SEQ ID NO: 379 - protein, 217 aa, Chlamydia pneumoniae
MKRVIYKTIFCGLTLLTSLSSCSLDPKGYNLETKNSRDLNQESVILKENRETPSLVKRLSRRSRRLFARRDQTQKDTLQVQANFKTYAEKISEQDERDLSFVVSSAAEKSSISLALSQGEIKDALYRIREVHPLALIEALAENPALIEGMKKMQGRDWIWNLFLTQLSEVFSQAWSQGVISEEDIAAFASTLGLDSGTVASIVQGERWPELVDIVIT

SEQ ID NO: 380 - DNA, 654 bp, Chlamydia pneumoniae
atgaaaagagtcatttataaaaccatattttgcgggttaactttacttacaagtttgagtagttgttccctggatcctaaaggatataacctagagacaaaaaactcgagggacttaaatcaagagtctgttatactgaaggaaaaccgtgaaacaccttctcttgttaagagactctctcgtcgttctcgaagactcttcgctcgacgtgatcaaactcagaaggatacgctgcaagtgcaagctaactttaagacctacgcagaaaagatttcagagcaggacgaaagagacctttctttcgttgtctcgtctgctgcagaaaagtcttcaatttcgttagctttgtctcagggtgaaattaaggatgctttgtaccgtatccgagaagtccaccctctagctttaatagaagctcttgctgaaaaccctgccttgatagaagggatgaaaaagatgcaaggccgtgattggatttggaatcttttcttaacacaattaagtgaagtattttctcaagcttggtctcaaggggttatctctgaagaagatatcgccgcatttgcctccaccttaggtttggactccgggaccgttgcgtccattgtccaaggggaaaggtggcccgagcttgtggatatagtgataacttaa

SEQ ID NO: 381 - DNA, 33 bp, Artificial Sequence
  PCR primer
gcgtcccgggtcatatgaagtcttctttcccca

SEQ ID NO: 382 - DNA, 27 bp, Artificial Sequence
  PCR primer
gcgtctcgagatgaaagagtttttgcg

SEQ ID NO: 383 - DNA, 34 bp, Artificial Sequence
  PCR primer
gcgtcccgggtcatatgtcagctctgttttctga

SEQ ID NO: 384 - DNA, 27 bp, Artificial Sequence
  PCR primer
gcgtctcgaggaattggtattttgctc

SEQ ID NO: 385 - DNA, 33 bp, Artificial Sequence
  PCR primer
gcgtcccgggtcatatggccgatctcacattag

SEQ ID NO: 386 - DNA, 28 bp, Artificial Sequence
  PCR primer
gcgtctcgaggtccaagttaaggtagca

SEQ ID NO: 387 - DNA, 32 bp, Artificial Sequence
  PCR primer
gcgtccgggtcatatgggtatcaagggaactg

SEQ ID NO: 388 - DNA, 25 bp, Artificial Sequence
  PCR primer
gcgtctcgagaaatccgaatcttcc

SEQ ID NO: 389 - DNA, 37 bp, Artificial Sequence
  PCR primer
gcgtcccgggtcatatgcaagactctcaagactatag

SEQ ID NO: 390 - DNA, 26 bp, Artificial Sequence
  PCR primer
gcgtctcgagaaatcggtatttaccc

SEQ ID NO: 391 - DNA, 36 bp, Artificial Sequence
  PCR primer
gcgtcccgggtgctagcactacgatttctttaaccc

SEQ ID NO: 392 - DNA, 27 bp, Artificial Sequence
  PCR primer
gcgtctcgagaaaacgaaatttgcttc

SEQ ID NO: 393 - DNA, 40 bp, Artificial Sequence
  PCR primer
gcgtcccgggtcatatgtttaaactgctaaaaaatctatt

SEQ ID NO: 394 - DNA, 28 bp, Artificial Sequence
  PCR primer
gcgtctcgagatgaaagaagagtcctcg

SEQ ID NO: 395 - DNA, 36 bp, Artificial Sequence
  PCR primer
gcgtcccgggtcatatgtcatctcctgtaaataaca

SEQ ID NO: 396 - DNA, 26 bp, Artificial Sequence
  PCR primer
gcgtctcgagctgaccatctcctgtt

SEQ ID NO: 397 - DNA, 32 bp, Artificial Sequence
  PCR primer
gcgtcccgggtcatatgtgcaaggagtccagt

SEQ ID NO: 398 - DNA, 28 bp, Artificial Sequence
  PCR primer
gcgtctcgagattttccttagcataacg

SEQ ID NO: 399 - DNA, 32 bp, Artificial Sequence
  PCR primer
gcgtcccgggtcatatgtgttccccatcccaa

SEQ ID NO: 400 - DNA, 35 bp, Artificial Sequence
  PCR primer
gcgtctcgagtagtttttctataaaacgaaagtct

SEQ ID NO: 401 - DNA, 34 bp, Artificial Sequence
  PCR primer
gcgtcccgggtcatatgtgctcctcctactcttc

SEQ ID NO: 402 - DNA, 30 bp, Artificial Sequence
  PCR primer
gcgtctcgagggggaaataggtatatttga

SEQ ID NO: 403 - DNA, 32 bp, Artificial Sequence
  PCR primer
gcgtcccgggtcatatgagctgctcaaagcaa

SEQ ID NO: 404 - DNA, 33 bp, Artificial Sequence
  PCR primer
gcgtctcgagacttaagatatcgatatttttga

SEQ ID NO: 405 - DNA, 33 bp, Artificial Sequence
  PCR primer
gcgtcccgggtcatatgtgccataaggaagatg

SEQ ID NO: 406 - DNA, 28 bp, Artificial Sequence
  PCR primer
gcgtctcgagaccattgtcttgagtcat

SEQ ID NO: 407 - DNA, 32 bp, Artificial Sequence
  PCR primer
gcgtcccgggtcatatgacctcaccgatcccc

SEQ ID NO: 408 - DNA, 26 bp, Artificial Sequence
  PCR primer
gcgtctcgagagaagccggtagaggc

SEQ ID NO: 409 - DNA, 37 bp, Artificial Sequence
  PCR primer
gcgtcccgggtcatatgactgaaaaagttaaagaagg

SEQ ID NO: 410 - DNA, 25 bp, Artificial Sequence
  PCR primer
gcgtctcgaggaacatgccccctaa

SEQ ID NO: 411 - DNA, 34 bp, Artificial Sequence
  PCR primer
gcgtcccgggtcatatgctacatccactaatggc

SEQ ID NO: 412 - DNA, 28 bp, Artificial Sequence
  PCR primer
gcgtctcgaggaaagaataacgagttcc

SEQ ID NO: 413 - DNA, 34 bp, Artificial Sequence
  PCR primer
gcgtcccgggtcatatggcagatgcttctttatc

SEQ ID NO: 414 - DNA, 27 bp, Artificial Sequence
  PCR primer
gcgtctcgaggaatgagtatcttagcc

SEQ ID NO: 415 - DNA, 35 bp, Artificial Sequence
  PCR primer
gcgtcccgggtcatatggctgttgttgaaatcaat

SEQ ID NO: 416 - DNA, 35 bp, Artificial Sequence
  PCR primer
gcgtccatggcggccgcgaactggaacttacctcc

SEQ ID NO: 417 - DNA, 36 bp, Artificial Sequence
  PCR primer
gcgtcccgggtgctagcgtagaagttatcatgcctt

SEQ ID NO: 418 - DNA, 34 bp, Artificial Sequence
  PCR primer
gcgtccatggcggccgcaaatcgtaatttgcttc

SEQ ID NO: 419 - DNA, 33 bp, Artificial Sequence
  PCR primer
gcgtggatcccatatggagactagactcggagg

SEQ ID NO: 420 - DNA, 28 bp, Artificial Sequence
  PCR primer
gcgtctcgagaaatgtggattttagtcc

SEQ ID NO: 421 - DNA, 34 bp, Artificial Sequence
  PCR primer
gcgtcccgggtgctagcaatgaaggtctccaact

SEQ ID NO: 422 - DNA, 28 bp, Artificial Sequence
  PCR primer
gcgtctcgagaaatctcattctactcgc

SEQ ID NO: 423 - DNA, 30 bp, Artificial Sequence
  PCR primer
gcgtgaattcatatgttcgggatgactcct

SEQ ID NO: 424 - DNA, 30 bp, Artificial Sequence
  PCR primer
gcgtctcgaggaattttaaggtacttcctg

SEQ ID NO: 425 - DNA, 36 bp, Artificial Sequence
  PCR primer
gcgtcccgggtgctagcactccctactctcatagag

SEQ ID NO: 426 - DNA, 27 bp, Artificial Sequence
  PCR primer
gcgtctcgagaaacttaaaggtcgttc

SEQ ID NO: 427 - DNA, 35 bp, Artificial Sequence
  PCR primer
gcgtcccgggtcatatgataaaacaaataggccgt

SEQ ID NO: 428 - DNA, 28 bp, Artificial Sequence
  PCR primer
gcgtctcgagttcgtaagcaacttcaga

SEQ ID NO: 429 - DNA, 33 bp, Artificial Sequence
  PCR primer
gcgtcccgggtcatatgaagcagatgcgtcttt

SEQ ID NO: 430 - DNA, 34 bp, Artificial Sequence
  PCR primer
gcgtccatggcggccgcgaaactaagggagaggc

SEQ ID NO: 431 - DNA, 32 bp, Artificial Sequence
  PCR primer
gcgtcccgggtcatatggatcccgcgtctgtt

SEQ ID NO: 432 - DNA, 34 bp, Artificial Sequence
  PCR primer
gcgtccatggcggccgcgaatacaaaccggatcc

SEQ ID NO: 433 - DNA, 39 bp, Artificial Sequence
  PCR primer
gcgtcccgggtcatatgcataaagtaatagttttcattt

SEQ ID NO: 434 - DNA, 29 bp, Artificial Sequence
  PCR primer
gcgtctcgagtaaactagaaaaagtcgtc

SEQ ID NO: 435 - DNA, 35 bp, Artificial Sequence
  PCR primer
gcgtcccgggtcatatgtcatcaaatctacatccc

SEQ ID NO: 436 - DNA, 27 bp, Artificial Sequence
  PCR primer
gcgtctcgagaacgcgagctattttac

SEQ ID NO: 437 - DNA, 32 bp, Artificial Sequence
  PCR primer
gcgtcccgggtgctagcagcgggggtatagag

SEQ ID NO: 438 - DNA, 28 bp, Artificial Sequence
  PCR primer
gcgtctcgagatacacgtgggtattttc

SEQ ID NO: 439 - DNA, 32 bp, Artificial Sequence
  PCR primer
gcgtcccgggtcatatgtgccgcattgtagat

SEQ ID NO: 440 - DNA, 25 bp, Artificial Sequence
  PCR primer
gcgtctcgagctgtttgcatctgcc

SEQ ID NO: 441 - DNA, 34 bp, Artificial Sequence
  PCR primer
gcgtcccgggtgctagctcaatagctattgcaag

SEQ ID NO: 442 - DNA, 27 bp, Artificial Sequence
  PCR primer
gcgtctcgagttatcgaaatgtctttg

SEQ ID NO: 443 - DNA, 32 bp, Artificial Sequence
  PCR primer
gcgtcccgggtcatatggcaacacccgctcaa

SEQ ID NO: 444 - DNA, 36 bp, Artificial Sequence
  PCR primer
gcgtccatggcggccgctccttgaaattgctcttgc

SEQ ID NO: 445 - DNA, 37 bp, Artificial Sequence
  PCR primer
gcgtcccgggtcatatgtataaaagatgtgtgctaga

SEQ ID NO: 446 - DNA, 27 bp, Artificial Sequence
  PCR primer
gcgtctcgagggatgtacttaagcacg

SEQ ID NO: 447 - DNA, 38 bp, Artificial Sequence
  PCR primer
gcgtcccgggtcatatgaagataaaattttcttggaag

SEQ ID NO: 448 - DNA, 25 bp, Artificial Sequence
  PCR primer
gcgtaagcttgggaagacgataccg

SEQ ID NO: 449 - DNA, 37 bp, Artificial Sequence
  PCR primer
gcgtcccgggtcatatgctctcggatcaatatatagg

SEQ ID NO: 450 - DNA, 28 bp, Artificial Sequence
  PCR primer
gcgtctcgagtcgaatttcttttttagc

SEQ ID NO: 451 - DNA, 37 bp, Artificial Sequence
  PCR primer
gcgtcccgggtcatatgaaaaaacaggtatatcaatg

SEQ ID NO: 452 - DNA, 28 bp, Artificial Sequence
  PCR primer
gcgtaagcttaaacgctgaaattatacc

SEQ ID NO: 453 - DNA, 32 bp, Artificial Sequence
  PCR primer
gcgtcccgggtcatatgtgtagcctttcccct

SEQ ID NO: 454 - DNA, 26 bp, Artificial Sequence
  PCR primer
gcgtctcgaggcgtgcatgaatctta

SEQ ID NO: 455 - DNA, 37 bp, Artificial Sequence
  PCR primer
gcgtcccgggtcatatggaagaattagaagttgttgt

SEQ ID NO: 456 - DNA, 29 bp, Artificial Sequence
  PCR primer
gcgtctcgagtagtgttctctttatcggt

SEQ ID NO: 457 - DNA, 33 bp, Artificial Sequence
  PCR primer
gcgtcccgggtcatatgctaggggctggaaacc

SEQ ID NO: 458 - DNA, 27 bp, Artificial Sequence
  PCR primer
gcgtaagcttaaactgcagacctgacg

SEQ ID NO: 459 - DNA, 38 bp, Artificial Sequence
  PCR primer
gcgtcccgggtcatatgactgctgttcttattcttaca

SEQ ID NO: 460 - DNA, 25 bp, Artificial Sequence
  PCR primer
gcgtctcgagatctgaaagcggagg

SEQ ID NO: 461 - DNA, 32 bp, Artificial Sequence
  PCR primer
gcgtcccgggtcatatgatcccatcccctacc

SEQ ID NO: 462 - DNA, 28 bp, Artificial Sequence
  PCR primer
gcgtctcgagatcaggttgctgagactt

SEQ ID NO: 463 - DNA, 35 bp, Artificial Sequence
  PCR primer
gcgtcccgggtcatatgaatctttcaaacaggtct

SEQ ID NO: 464 - DNA, 31 bp, Artificial Sequence
  PCR primer
gcgtctcgagattttttctagagagactctc

SEQ ID NO: 465 - DNA, 28 bp, Artificial Sequence
  PCR primer
gtgcgtcatatggcaaccactccactaa

SEQ ID NO: 466 - DNA, 31 bp, Artificial Sequence
  PCR primer
actcgctagcggccgctaatgaggtccccag

SEQ ID NO: 467 - DNA, 30 bp, Artificial Sequence
  PCR primer
gtgcgtcatatgaatttattaggagctgct

SEQ ID NO: 468 - DNA, 34 bp, Artificial Sequence
  PCR primer
actcgctagcggccgcaaatttgattttgctacc

SEQ ID NO: 469 - DNA, 30 bp, Artificial Sequence
  PCR primer
gtgcgtcatatggcagcacaagttgtatat

SEQ ID NO: 470 - DNA, 32 bp, Artificial Sequence
  PCR primer
actcgctagcggccgctggcgtagaagtgatc

SEQ ID NO: 471 - DNA, 27 bp, Artificial Sequence
  PCR primer
gtgcgtcatatgttgcctgtagggaac

SEQ ID NO: 472 - DNA, 34 bp, Artificial Sequence
  PCR primer
actcgctagcggccgcgaatctgaactgaccaga

SEQ ID NO: 473 - DNA, 30 bp, Artificial Sequence
  PCR primer
gtgcgtcatatggttaatcctattggtcca

SEQ ID NO: 474 - DNA, 36 bp, Artificial Sequence
  PCR primer
actcgctagcggccgcttggagataaccagaatata

SEQ ID NO: 475 - DNA, 32 bp, Artificial Sequence
  PCR primer
gtgcgtcatatgttacacagctcagaactaga

SEQ ID NO: 476 - DNA, 35 bp, Artificial Sequence
  PCR primer
actcgctagcggccgcgaaaataatacggatacca

SEQ ID NO: 477 - DNA, 30 bp, Artificial Sequence
  PCR primer
gtgcgtcatatggcaactgctgaaaatata

SEQ ID NO: 478 - DNA, 26 bp, Artificial Sequence
  PCR primer
gcgtctcgaggaattggaacttaccc

SEQ ID NO: 479 - DNA, 33 bp, Artificial Sequence
  PCR primer
gtgcgtgctagcattttttatgacaaactctat

SEQ ID NO: 480 - DNA, 27 bp, Artificial Sequence
  PCR primer
gcgtctcgagaaatgtgcaatgactct

SEQ ID NO: 481 - DNA, 30 bp, Artificial Sequence
  PCR primer
gtgcgtcatatgttgactcatcaagaggct

SEQ ID NO: 482 - DNA, 29 bp, Artificial Sequence
  PCR primer
gcgtctcgaggaagggaggttttttaggt

SEQ ID NO: 483 - DNA, 28 bp, Artificial Sequence
  PCR primer
gtgcgtcatatgacatatctggaagctc

SEQ ID NO: 484 - DNA, 32 bp, Artificial Sequence
  PCR primer
actcgctagcggccgcctccacaatttttatg

SEQ ID NO: 485 - DNA, 36 bp, Artificial Sequence
  PCR primer
gtgcgtcatatgccctttgatattacttattataca

SEQ ID NO: 486 - DNA, 25 bp, Artificial Sequence
  PCR primer
gcgtctcgagtcgtttccaaatcca

SEQ ID NO: 487 - DNA, 34 bp, Artificial Sequence
  PCR primer
gtgcgtcatatgaaacaacactattctctaaata

SEQ ID NO: 488 - DNA, 27 bp, Artificial Sequence
  PCR primer
gcgtctcgagtttcttgtggtttttct

SEQ ID NO: 489 - DNA, 27 bp, Artificial Sequence
  PCR primer
gtgcgtcatatgcgagaggtgcctaag

SEQ ID NO: 490 - DNA, 32 bp, Artificial Sequence
  PCR primer
actcgctagcggccgctctcctagacagcctt

SEQ ID NO: 491 - DNA, 31 bp, Artificial Sequence
  PCR primer
gtgcgtcatatgaatgttgcggatctccttt

SEQ ID NO: 492 - DNA, 25 bp, Artificial Sequence
  PCR primer
gcgtctcgaggaaggggttggccgt

SEQ ID NO: 493 - DNA, 31 bp, Artificial Sequence
  PCR primer
gtgcgtcatatgtgtaatcaaaagccctctt

SEQ ID NO: 494 - DNA, 25 bp, Artificial Sequence
  PCR primer
gcgtctcgaggggctgaggaggaac

SEQ ID NO: 495 - DNA, 33 bp, Artificial Sequence
  PCR primer
gtgcgtgctagcaaacactacctatcattttct

SEQ ID NO: 496 - DNA, 27 bp, Artificial Sequence
  PCR primer
gcgtctcgagcagaaaggcttttcttt

SEQ ID NO: 497 - DNA, 33 bp, Artificial Sequence
  PCR primer
gtgcgtcatatgaatttaggctatgttaattta

SEQ ID NO: 498 - DNA, 28 bp, Artificial Sequence
  PCR primer
gcgtctcgaggttttgttttttgaaaga

SEQ ID NO: 499 - DNA, 28 bp, Artificial Sequence
  PCR primer
gtgcgtcatatggcagcatcaggaggca

SEQ ID NO: 500 - DNA, 30 bp, Artificial Sequence
  PCR primer
gcgtctcgagtgaccaaggatagggtttag

SEQ ID NO: 501 - DNA, 29 bp, Artificial Sequence
  PCR primer
gtgcgtcatatgcctcgtggtgacacttt

SEQ ID NO: 502 - DNA, 25 bp, Artificial Sequence
  PCR primer
gcgtctcgagcgctgcttcttgctc

SEQ ID NO: 503 - DNA, 31 bp, Artificial Sequence
  PCR primer
gtgcgtcatatgtgctctcaaaaaacgacaa

SEQ ID NO: 504 - DNA, 25 bp, Artificial Sequence
  PCR primer
gcgtctcgagtgaagaggcgccatc

SEQ ID NO: 505 - DNA, 27 bp, Artificial Sequence
  PCR primer
gtgcgtcatatggatgcgaaaatggga

SEQ ID NO: 506 - DNA, 28 bp, Artificial Sequence
  PCR primer
gcgtctcgagtctttgacattcaagagc

SEQ ID NO: 507 - DNA, 30 bp, Artificial Sequence
  PCR primer
gtgcgtcatatgattcctaccatgttaatg

SEQ ID NO: 508 - DNA, 31 bp, Artificial Sequence
  PCR primer
gcgtctcgaggtcatacaatttccttatata

SEQ ID NO: 509 - DNA, 28 bp, Artificial Sequence
  PCR primer
gtgcgtcatatgtgcactcacttaggct

SEQ ID NO: 510 - DNA, 28 bp, Artificial Sequence
  PCR primer
gcgtctcgagcgagtagttagcacaaac

SEQ ID NO: 511 - DNA, 30 bp, Artificial Sequence
  PCR primer
gtgcgtgctagcaagacaatcgtagcttca

SEQ ID NO: 512 - DNA, 31 bp, Artificial Sequence
  PCR primer
actcgctagcggccgcggctggcatataggt

SEQ ID NO: 513 - DNA, 34 bp, Artificial Sequence
  PCR primer
gtgcgtgctagcaaatcaagatgttctattgata

SEQ ID NO: 514 - DNA, 26 bp, Artificial Sequence
  PCR primer
gcgtctcgagtccaaaacaaccctct

SEQ ID NO: 515 - DNA, 35 bp, Artificial Sequence
  PCR primer
gtgcgtcatatgtgcgtaagttatattaattcctt

SEQ ID NO: 516 - DNA, 25 bp, Artificial Sequence
  PCR primer
gcgtctcgagcagtcgggcttgttg

SEQ ID NO: 517 - DNA, 28 bp, Artificial Sequence
  PCR primer
gtgcgtcatatgtcggatcttttacgag

SEQ ID NO: 518 - DNA, 32 bp, Artificial Sequence
  PCR primer
gcgtctcgagttttctacactgttgtaataaa

SEQ ID NO: 519 - DNA, 27 bp, Artificial Sequence
  PCR primer
gtgcgtcatatgaatcagctgctttct

SEQ ID NO: 520 - DNA, 28 bp, Artificial Sequence
  PCR primer
gcgtctcgagagagaaggtaattgtacc

SEQ ID NO: 521 - DNA, 36 bp, Artificial Sequence
  PCR primer
gtgcgtcatatgtgtctacttattatctatctctac

SEQ ID NO: 522 - DNA, 25 bp, Artificial Sequence
  PCR primer
gcgtctcgagttcagaaaaatggct

SEQ ID NO: 523 - DNA, 27 bp, Artificial Sequence
  PCR primer
gtgcgtcatatgtccccacgacgacaa

SEQ ID NO: 524 - DNA, 26 bp, Artificial Sequence
  PCR primer
gcgtctcgagtcctgcagcatttagc

SEQ ID NO: 525 - DNA, 28 bp, Artificial Sequence
  PCR primer
gtgcgtcatatgtgtgacgtacggtcta

SEQ ID NO: 526 - DNA, 32 bp, Artificial Sequence
  PCR primer
actcgctagcggccgcttcaccttgatttcct

SEQ ID NO: 527 - DNA, 25 bp, Artificial Sequence
  PCR primer
gtgcgtcatatgtgcgatgcaaaac

SEQ ID NO: 528 - DNA, 35 bp, Artificial Sequence
  PCR primer
actcgctagcggccgcggaagtatgcttagatatt

SEQ ID NO: 529 - DNA, 30 bp, Artificial Sequence
  PCR primer
gtgcgtcatatgtgctgtggttactctatt

SEQ ID NO: 530 - DNA, 36 bp, Artificial Sequence
  PCR primer
actcgctagcggccgcaaaaaggtcatagtatacct

SEQ ID NO: 531 - DNA, 31 bp, Artificial Sequence
  PCR primer
gtgcgtcatatgaaaactgtgatattgaaca

SEQ ID NO: 532 - DNA, 31 bp, Artificial Sequence
  PCR primer
gcgtctcgagctgagcttctatttctattat

SEQ ID NO: 533 - DNA, 27 bp, Artificial Sequence
  PCR primer
gtgcgtcatatgcccatttatgggaaa

SEQ ID NO: 534 - DNA, 26 bp, Artificial Sequence
  PCR primer
gcgtctcgaggttgagcaaaggtttg

SEQ ID NO: 535 - DNA, 29 bp, Artificial Sequence
  PCR primer
gtgcgtcatatgtattcgtgttacagcaa

SEQ ID NO: 536 - DNA, 28 bp, Artificial Sequence
  PCR primer
gcgtctcgaggaaaaattctttagggag

SEQ ID NO: 537 - DNA, 27 bp, Artificial Sequence
  PCR primer
gtgcgtcatatggccgctaaagcaaat

SEQ ID NO: 538 - DNA, 28 bp, Artificial Sequence
  PCR primer
gcgtctcgagtgaaaatgaaaggatggt

SEQ ID NO: 539 - DNA, 32 bp, Artificial Sequence
  PCR primer
gtgcgtgctagcagtctatatcaaaaatggtg

SEQ ID NO: 540 - DNA, 29 bp, Artificial Sequence
  PCR primer
gcgtctcgagatctttcatttggttatct

SEQ ID NO: 541 - DNA, 29 bp, Artificial Sequence
  PCR primer
gtgcgtcatatgaaagatttggggactct

SEQ ID NO: 542 - DNA, 29 bp, Artificial Sequence
  PCR primer
gcgtctcgaggaatcctaaggcataccta

SEQ ID NO: 543 - DNA, 33 bp, Artificial Sequence
  PCR primer
gtgcgtgctagcagtatagtcagaaattctgca

SEQ ID NO: 544 - DNA, 33 bp, Artificial Sequence
  PCR primer
gcgtctcgaggaagctaagattatagctacttt

SEQ ID NO: 545 - DNA, 25 bp, Artificial Sequence
  PCR primer
gtgcgtgctagcgcggccctttcca

SEQ ID NO: 546 - DNA, 39 bp, Artificial Sequence
  PCR primer
actcgctagcggccgctttatgtatatggaacagatagg

SEQ ID NO: 547 - DNA, 31 bp, Artificial Sequence
  PCR primer
gtgcgtcatatgggacattttattgatattg

SEQ ID NO: 548 - DNA, 35 bp, Artificial Sequence
  PCR primer
actcgctagcggccgcatcatcaaggtagataaag

SEQ ID NO: 549 - DNA, 33 bp, Artificial Sequence
  PCR primer
gtgcgtcatatgggttattgctatgtaattaca

SEQ ID NO: 550 - DNA, 26 bp, Artificial Sequence
  PCR primer
gcgtctcgagttctgattggactcca

SEQ ID NO: 551 - DNA, 29 bp, Artificial Sequence
  PCR primer
gtgcgtcatatggtggctttaacgatagc

SEQ ID NO: 552 - DNA, 30 bp, Artificial Sequence
  PCR primer
actcgctagcggccggcagccatcgtattc

SEQ ID NO: 553 - DNA, 26 bp, Artificial Sequence
  PCR primer
gtgcgtcatatgttcaatatgcgagg

SEQ ID NO: 554 - DNA, 28 bp, Artificial Sequence
  PCR primer
gcgtctcgagcttcttatttgaactttg

SEQ ID NO: 555 - DNA, 27 bp, Artificial Sequence
  PCR primer
gtgcgtcatatgacagccggagcagct

SEQ ID NO: 556 - DNA, 29 bp, Artificial Sequence
  PCR primer
gcgtctcgagagcaccctcaatttcattg

SEQ ID NO: 557 - DNA, 33 bp, Artificial Sequence
  PCR primer
gtgcgtcatatgggatatgttttctatgtgatc

SEQ ID NO: 558 - DNA, 28 bp, Artificial Sequence
  PCR primer
gcgtctcgaggctactaaatcgaatcga

SEQ ID NO: 559 - DNA, 30 bp, Artificial Sequence
  PCR primer
gtgcgtcatatgatccctggattaagttca

SEQ ID NO: 560 - DNA, 32 bp, Artificial Sequence
  PCR primer
actcgctagcggccgcttcactgggagcttga

SEQ ID NO: 561 - DNA, 31 bp, Artificial Sequence
  PCR primer
gtgcgtcatatgtaccaggagaatctaagat

SEQ ID NO: 562 - DNA, 34 bp, Artificial Sequence
  PCR primer
actcgctagcggccgcgattttcttcttcagctc

SEQ ID NO: 563 - DNA, 30 bp, Artificial Sequence
  PCR primer
gtgcgtcatatggaggaggtgtctgagtat

SEQ ID NO: 564 - DNA, 37 bp, Artificial Sequence
  PCR primer
actcgctagcggccgcatgtttctttttactctttct

SEQ ID NO: 565 - DNA, 27 bp, Artificial Sequence
  PCR primer
gtgcgtcatatggctccagtccgtgtt

SEQ ID NO: 566 - DNA, 27 bp, Artificial Sequence
  PCR primer
gcgtctcgagaagtgttcgttggaagt

SEQ ID NO: 567 - DNA, 32 bp, Artificial Sequence
  PCR primer
gtgcgtcatatgaataagctactcaatttcgt

SEQ ID NO: 568 - DNA, 29 bp, Artificial Sequence
  PCR primer
gcgtctcgaggaaaatctgaattcttcct

SEQ ID NO: 569 - DNA, 30 bp, Artificial Sequence
  PCR primer
gtgcgtcatatgttaaattcaagcaattca

SEQ ID NO: 570 - DNA, 29 bp, Artificial Sequence
  PCR primer
gcgtctcgagaggaactaaaacctcatct

SEQ ID NO: 571 - DNA, 30 bp, Artificial Sequence
  PCR primer
gtgcgtgctagcgttttatttcatgctcaa

SEQ ID NO: 572 - DNA, 40 bp, Artificial Sequence
  PCR primer
actcgctagcggccgccttagaaagactattttctaagta

SEQ ID NO: 573 - DNA, 26 bp, Artificial Sequence
  PCR primer
gtgcgtcatatgtgcgtgataatggg

SEQ ID NO: 574 - DNA, 29 bp, Artificial Sequence
  PCR primer
gcgtctcgagattcatcttcgtaaagaat

SEQ ID NO: 575 - DNA, 26 bp, Artificial Sequence
  PCR primer
gtgcgtcatatggcagttggtggcgt

SEQ ID NO: 576 - DNA, 31 bp, Artificial Sequence
  PCR primer
actcgctagcggccgcctgtccctctggagc

SEQ ID NO: 577 - DNA, 30 bp, Artificial Sequence
  PCR primer
gtgcgtgctagcagtgaacacaaaaaatca

SEQ ID NO: 578 - DNA, 35 bp, Artificial Sequence
  PCR primer
actcgctagcggccgccttatcgtcgttatcaata

SEQ ID NO: 579 - DNA, 29 bp, Artificial Sequence
  PCR primer
gtgcgtcatatgcatgacgcacttctaag

SEQ ID NO: 580 - DNA, 23 bp, Artificial Sequence
  PCR primer
gcgtctcgagtacagctgcgcga

SEQ ID NO: 581 - DNA, 31 bp, Artificial Sequence
  PCR primer
gtgcgtcatatggttatgggaacctatatcg

SEQ ID NO: 582 - DNA, 30 bp, Artificial Sequence
  PCR primer
gcgtctcgagtacatttgtattgatttcag

SEQ ID NO: 583 - DNA, 27 bp, Artificial Sequence
  PCR primer
gtgcgtcatatgaacgtccctgattcc

SEQ ID NO: 584 - DNA, 25 bp, Artificial Sequence
  PCR primer
gcgtctcgaggctagcggctctttc

SEQ ID NO: 585 - DNA, 28 bp, Artificial Sequence
  PCR primer
gtgcgtcatatgcagaagcatccttcct

SEQ ID NO: 586 - DNA, 33 bp, Artificial Sequence
  PCR primer
actcgctagcggccgctcctctttaggaaatgg

SEQ ID NO: 587 - DNA, 29 bp, Artificial Sequence
  PCR primer
gtgcgtcatatgtcctctttaggaaatgg

SEQ ID NO: 588 - DNA, 26 bp, Artificial Sequence
  PCR primer
gcgtctcgagcagtgccaagtaggga

SEQ ID NO: 589 - DNA, 31 bp, Artificial Sequence
  PCR primer
gtgcgtcatatggcagtacgattaattgttg

SEQ ID NO: 590 - DNA, 35 bp, Artificial Sequence
  PCR primer
gcgtctcgagtttattgtagtctattttatatttc

SEQ ID NO: 591 - DNA, 29 bp, Artificial Sequence
  PCR primer
gtgcgtgctagcagcagaaaagacaatga

SEQ ID NO: 592 - DNA, 27 bp, Artificial Sequence
  PCR primer
gcgtctcgagattttgagtgtcttgca

SEQ ID NO: 593 - DNA, 30 bp, Artificial Sequence
  PCR primer
gtgcgtcatatgattaccataaatcacgtg

SEQ ID NO: 594 - DNA, 28 bp, Artificial Sequence
  PCR primer
gcgtctcgagtatccatcgacttatagc

SEQ ID NO: 595 - DNA, 30 bp, Artificial Sequence
  PCR primer
gtgcgtgctagctgtattttcccttacgta

SEQ ID NO: 596 - DNA, 33 bp, Artificial Sequence
  PCR primer
actcgctagcggccgcggattctgcatactctg

SEQ ID NO: 597 - DNA, 30 bp, Artificial Sequence
  PCR primer
gtgcgtcatatgtctcctcttcctaaaaaa

SEQ ID NO: 598 - DNA, 27 bp, Artificial Sequence
  PCR primer
gcgtctcgagggattcattactgacca

SEQ ID NO: 599 - DNA, 27 bp, Artificial Sequence
  PCR primer
gtgcgtcatatgaaataccgcttcacg

SEQ ID NO: 600 - DNA, 27 bp, Artificial Sequence
  PCR primer
gcgtctcgagattctgtagggctacgt

SEQ ID NO: 601 - DNA, 32 bp, Artificial Sequence
  PCR primer
gtgcgtcatatggtacacttctctcataaccc

SEQ ID NO: 602 - DNA, 29 bp, Artificial Sequence
  PCR primer
gcgtctcgagtaagtttgtattgcggtat

SEQ ID NO: 603 - DNA, 33 bp, Artificial Sequence
  PCR primer
gtgcgtcatatgttgttattagggactttagga

SEQ ID NO: 604 - DNA, 23 bp, Artificial Sequence
  PCR primer
gcgtctcgagtttcccaaccgca

SEQ ID NO: 605 - DNA, 25 bp, Artificial Sequence
  PCR primer
gtgcgtcatatggctgcgaatgctc

SEQ ID NO: 606 - DNA, 31 bp, Artificial Sequence
  PCR primer
gcgtctcgagtaatttaatactctttgaagg

SEQ ID NO: 607 - DNA, 32 bp, Artificial Sequence
  PCR primer
gtgcgtcatatgcctactcaagttaaaacaga

SEQ ID NO: 608 - DNA, 30 bp, Artificial Sequence
  PCR primer
gcgtctcgagaagtttatatttcagcactt

SEQ ID NO: 609 - DNA, 29 bp, Artificial Sequence
  PCR primer
gtgcgtgctagccatataggattttgcca

SEQ ID NO: 610 - DNA, 27 bp, Artificial Sequence
  PCR primer
gcgtctcgaggtacttagcaaagcgat

SEQ ID NO: 611 - DNA, 31 bp, Artificial Sequence
  PCR primer
gtgcgtgctagcaagaagctatatcacccta

SEQ ID NO: 612 - DNA, 24 bp, Artificial Sequence
  PCR primer
gcgtctcgagcacaccgaggaaac

SEQ ID NO: 613 - DNA, 33 bp, Artificial Sequence
  PCR primer
gtgcgtcatatggtagtttcagaagaaaaagtc

SEQ ID NO: 614 - DNA, 25 bp, Artificial Sequence
  PCR primer
gcgtctcgagacgtatgcgcaactg

SEQ ID NO: 615 - DNA, 30 bp, Artificial Sequence
  PCR primer
gtgcgtcatatggaagtattagaccgctct

SEQ ID NO: 616 - DNA, 25 bp, Artificial Sequence
  PCR primer
gcgtctcgagcgagaaaaagcttcc

SEQ ID NO: 617 - DNA, 29 bp, Artificial Sequence
  PCR primer
gtgcgtcatatgatgaagaaaattcgaaa

SEQ ID NO: 618 - DNA, 33 bp, Artificial Sequence
  PCR primer
actcgctagcggccgctaagcattcacaaatga

SEQ ID NO: 619 - DNA, 30 bp, Artificial Sequence
  PCR primer
gtgcgtcatatgcatattttgcttgatcgt

SEQ ID NO: 620 - DNA, 33 bp, Artificial Sequence
  PCR primer
gcgtctcgagtcttttaactaaatcttgttctt

SEQ ID NO: 621 - DNA, 32 bp, Artificial Sequence
  PCR primer
gtgcgtcatatgcttgtctattgttttgatcc

SEQ ID NO: 622 - DNA, 28 bp, Artificial Sequence
  PCR primer
gcgtctcgagaaaatatacggaactcgc

SEQ ID NO: 623 - DNA, 31 bp, Artificial Sequence
  PCR primer
gtgcgtgctagcgaagtttatagtttttccc

SEQ ID NO: 624 - DNA, 29 bp, Artificial Sequence
  PCR primer
gcgtctcgagtttttgattccttaagaag

SEQ ID NO: 625 - DNA, 33 bp, Artificial Sequence
  PCR primer
gtgcgtcatatggaagtttatagttttcaccct

SEQ ID NO: 626 - DNA, 27 bp, Artificial Sequence
  PCR primer
gcgtctcgagactccttgagaagggaa

SEQ ID NO: 627 - DNA, 31 bp, Artificial Sequence
  PCR primer
gtgcgtcatatgcttaatcatgctaaaaagc

SEQ ID NO: 628 - DNA, 36 bp, Artificial Sequence
  PCR primer
actcgctagcggccgcctcttttattttaggaagct

SEQ ID NO: 629 - DNA, 34 bp, Artificial Sequence
  PCR primer
gtgcgtcatatgaaaaaaaaatttattttctact

SEQ ID NO: 630 - DNA, 33 bp, Artificial Sequence
  PCR primer
actcgctagcggccgccacactctgttcttctg

SEQ ID NO: 631 - DNA, 32 bp, Artificial Sequence
  PCR primer
gtgcgtcatatgttttctaaggatttgactaa

SEQ ID NO: 632 - DNA, 25 bp, Artificial Sequence
  PCR primer
gcgtctcgagcgaagcagaagtcgt

SEQ ID NO: 633 - DNA, 30 bp, Artificial Sequence
  PCR primer
gtgcgtcatatgaatatgcctgttccttct

SEQ ID NO: 634 - DNA, 25 bp, Artificial Sequence
  PCR primer
gcgtctcgagggggcgtaggttgta

SEQ ID NO: 635 - DNA, 27 bp, Artificial Sequence
  PCR primer
gtgcgtcatatgtgttccctggatcct

SEQ ID NO: 636 - DNA, 37 bp, Artificial Sequence
  PCR primer
actcgctagcggccgcagttatcactatatccacaag

SEQ ID NO: 637 - DNA, 33 bp, Artificial Sequence
  PCR primer
gtgcgtgctagccttgaacattctaaacaagat

SEQ ID NO: 638 - DNA, 30 bp, Artificial Sequence
  PCR primer
gcgtctcgagacgtagtttaagagcagact

SEQ ID NO: 639 - DNA, 31 bp, Artificial Sequence
  PCR primer
gtgcgtcatatgtgtctatctgcctacatag

SEQ ID NO: 640 - DNA, 27 bp, Artificial Sequence
  PCR primer
gcgtctcgagttttgatgcttctttca

SEQ ID NO: 641 - DNA, 29 bp, Artificial Sequence
  PCR primer
gtgcgtcatatggaccagaaaattgaaaa

SEQ ID NO: 642 - DNA, 27 bp, Artificial Sequence
  PCR primer
gcgtctcgagagaggtcttctgagtgc

SEQ ID NO: 643 - DNA, 32 bp, Artificial Sequence
  PCR primer
gtgcgtcatatgaatttccattgtagtgtagt

SEQ ID NO: 644 - DNA, 27 bp, Artificial Sequence
  PCR primer
gcgtctcgaggaacagttcgatttgtg

SEQ ID NO: 645 - DNA, 29 bp, Artificial Sequence
  PCR primer
gtgcgtcatatgcttcctttatcagggca

SEQ ID NO: 646 - DNA, 32 bp, Artificial Sequence
  PCR primer
actcgctagcggccgcttcttcaggtttcagg

SEQ ID NO: 647 - DNA, 27 bp, Artificial Sequence
  PCR primer
gtgcgtgctagccgttatgccgaggtc

SEQ ID NO: 648 - DNA, 25 bp, Artificial Sequence
  PCR primer
gcgtctcgagttcgtgcatttggtg

SEQ ID NO: 649 - DNA, 29 bp, Artificial Sequence
  PCR primer
gtgcgtcatatgttgaaaatccagaaaaa

SEQ ID NO: 650 - DNA, 27 bp, Artificial Sequence
  PCR primer
gcgtctcgagattcattttcggaagag

SEQ ID NO: 651 - DNA, 32 bp, Artificial Sequence
  PCR primer
gtgcgtcatatgagacgttatcttttcatggt

SEQ ID NO: 652 - DNA, 29 bp, Artificial Sequence
  PCR primer
gcgtctcgagccctttgctctttacatag

SEQ ID NO: 653 - DNA, 31 bp, Artificial Sequence
  PCR primer
gtgcgtactagttgtcacctacagtcactag

SEQ ID NO: 654 - DNA, 26 bp, Artificial Sequence
  PCR primer
gcgtctcgaggaatcggagtttggta

SEQ ID NO: 655 - DNA, 30 bp, Artificial Sequence
  PCR primer
gtgcgtactagtaagtcctctgtctcttgg

SEQ ID NO: 656 - DNA, 29 bp, Artificial Sequence
  PCR primer
gcgtctcgaggaaacaaaacttagagccc

SEQ ID NO: 657 - DNA, 168 bp, Artificial Sequence
  Restriction linker
gatcccatatggctagcccggggaattcgtccatggagtgagtcgactgactcgagtgatcgagctcctgagcggccgcatgaaggtataccgatcgggccccttaagcaggtacctcactcagctgactgagctcactagctcgaggactcgccggcgtactttcga

SEQ ID NO: 658 - DNA, 96 bp, Artificial Sequence
  Restriction linker
tcgacaagcttgcggccgcactcgagcatcaccatcaccatcactgatgttcgaacgccggcgtgagcacgtagaggtagtggtagtgactatcga

SEQ ID NO: 659 - DNA, 12 bp, Artificial Sequence
  Primer tail
gtgcgtcatatg

SEQ ID NO: 660 - DNA, 10 bp, Artificial Sequence
  Primer tail
gcgtctcgag

SEQ ID NO: 661 - DNA, 12 bp, Artificial Sequence
  Primer tail
gtgcgtgctagc

SEQ ID NO: 662 - DNA, 16 bp, Artificial Sequence
  Primer tail
actcgctagcggccgc

SEQ ID NO: 663 - DNA, 12 bp, Artificial Sequence
  Primer tail
gtgcgtactagt

SEQ ID NO: 664 - DNA, 10 bp, Artificial Sequence
  Primer tail
gcgtaagctt

1. A protein comprising an amino acid sequence selected from the group consisting of SEQ IDs 97, 1, 3, 5, 7, 9, 11, 13, 15, 17, 19, 21, 23, 25, 27, 29, 31, 33, 35, 37, 39, 41, 43, 45, 47, 49, 51, 53, 55, 57, 59, 61, 63, 65, 67, 69, 71, 73, 75, 77, 79, 81, 83, 85, 87, 89, 91, 93, 95, 99, 101, 103, 105, 107, 109, 111, 113, 115, 117, 119, 121, 123, 125, 127, 129, 131, 133, 135, 137, 139, 141, 143, 145, 147, 149, 151, 153, 155, 157, 159, 161, 163, 165, 167, 169, 171, 173, 175, 177, 179, 181, 183, 185, 187, 189, 191, 193, 195, 197, 199, 201, 203, 205, 207, 209, 211, 213, 215, 217, 219, 221, 223, 225, 227, 229, 231, 233, 235, 237, 239, 241, 243, 245, 247, 249, 251, 253, 255, 257, 259, 261, 263, 265, 267, 269, 271, 273, 275, 277, 279, 281, 283, 285, 287, 289, 291, 293, 295, 297, 299, 301, 303, 305, 307, 309, 311, 313, 315, 317, 319, 321, 323, 325, 327, 329, 331, 333, 335, 337, 339, 341, 343, 345, 347, 349, 351, 353, 355, 357, 359, 361, 363, 365, 367, 369, 371, 373, 375, & 377.

2. A protein having 50% or greater sequence identity to a protein according to claim 1.

3. A protein comprising a fragment of an amino acid sequence selected from the group consisting of SEQ IDs 97, 1, 3, 5, 7, 9, 11, 13, 15, 17, 19, 21, 23, 25, 27, 29, 31, 33, 35, 37, 39, 41, 43, 45, 47, 49, 51, 53, 55, 57, 59, 61, 63, 65, 67, 69, 71, 73, 75, 77, 79, 81, 83, 85, 87, 89, 91, 93, 95, 99, 101, 103, 105, 107, 109, 111, 113, 115, 117, 119, 121, 123, 125, 127, 129, 131, 133, 135, 137, 139, 141, 143, 145, 147, 149, 151, 153, 155, 157, 159, 161, 163, 165, 167, 169, 171, 173, 175, 177, 179, 181, 183, 185, 187, 189, 191, 193, 195, 197, 199, 201, 203, 205, 207, 209, 211, 213, 215, 217, 219, 221, 223, 225, 227, 229, 231, 233, 235, 237, 239, 241, 243, 245, 247, 249, 251, 253, 255, 257, 259, 261, 263, 265, 267, 269, 271, 273, 275, 277, 279, 281, 283, 285, 287, 289, 291, 293, 295, 297, 299, 301, 303, 305, 307, 309, 311, 313, 315, 317, 319, 321, 323, 325, 327, 329, 331, 333, 335, 337, 339, 341, 343, 345, 347, 349, 351, 353, 355, 357, 359, 361, 363, 365, 367, 369, 371, 373, 375, & 377.

4. A nucleic acid molecule which encodes a protein according to any one of claims 1 to 3.

5. A nucleic acid molecule according to claim 4, comprising a nucleotide sequence selected from the group consisting of SEQ IDs 98, 2, 4, 6, 8, 10, 12, 14, 16, 18, 20, 22, 24, 26, 28, 30, 32, 34, 36, 38, 40, 42, 44, 46, 48, 50, 52, 54, 56, 58, 60, 62, 64, 66, 68, 70, 72, 74, 76, 78, 80, 82, 84, 86, 88, 90, 92, 94, 96, 100, 102, 104, 106, 108, 110, 112, 114, 116, 118, 120, 122, 124, 126, 128, 130, 132, 134, 136, 138, 140, 142, 144, 146, 148, 150, 152, 154, 156, 158, 160, 162, 164, 166, 168, 170, 172, 174, 176, 178, 180, 182, 184, 186, 188, 190, 192, 194, 196, 198, 200, 202, 204, 206, 208, 210, 212, 214, 216, 218, 220, 222, 224, 226, 228, 230, 232, 234, 236, 238, 240, 242, 244, 246, 248, 250, 252, 254, 256, 258, 260, 262, 264, 266, 268, 270, 272, 274, 276, 278, 280, 282, 284, 286, 288, 290, 292, 294, 296, 298, 300, 302, 304, 306, 308, 310, 312, 314, 316, 318, 320, 322, 324, 326, 328, 330, 332, 334, 336, 338, 340, 342, 344, 346, 348, 350, 352, 354, 356, 358, 360, 362, 364, 366, 368, 370, 372, 374, 376, & 378.

6. A nucleic acid molecule comprising a fragment of a nucleotide sequence selected from the group consisting of SEQ IDs 98, 2, 4, 6, 8, 10, 12, 14, 16, 18, 20, 22, 24, 26, 28, 30, 32, 34, 36, 38, 40, 42, 44, 46, 48, 50, 52, 54, 56, 58, 60, 62, 64, 66, 68, 70, 72, 74, 76, 78, 80, 82, 84, 86, 88, 90, 92, 94, 96, 100, 102, 104, 106, 108, 110, 112, 114, 116, 118, 120, 122, 124, 126, 128, 130, 132, 134, 136, 138, 140, 142, 144, 146, 148, 150, 152, 154, 156, 158, 160, 162, 164, 166, 168, 170, 172, 174, 176, 178, 180, 182, 184, 186, 188, 190, 192, 194, 196, 198, 200, 202, 204, 206, 208, 210, 212, 214, 216, 218, 220, 222, 224, 226, 228, 230, 232, 234, 236, 238, 240, 242, 244, 246, 248, 250, 252, 254, 256, 258, 260, 262, 264, 266, 268, 270, 272, 274, 276, 278, 280, 282, 284, 286, 288, 290, 292, 294, 296, 298, 300, 302, 304, 306, 308, 310, 312, 314, 316, 318, 320, 322, 324, 326, 328, 330, 332, 334, 336, 338, 340, 342, 344, 346, 348, 350, 352, 354, 356, 358, 360, 362, 364, 366, 368, 370, 372, 374, 376, & 378.

7. A nucleic acid molecule comprising a nucleotide sequence complementary to a nucleic acid molecule according to any one of claims 4 to 6.

8. A nucleic acid molecule comprising a nucleotide sequences having 50% or greater sequence identity to a nucleic acid molecule according to any one of claims 4 to 7.

9. A nucleic acid molecule which can hybridise to a nucleic acid molecule according to any one of claims 4 to 8 under high stringency conditions.

10. A composition comprising a protein or a nucleic acid molecule according to any preceding claim.

11. A composition according to claim 10 being a vaccine composition.

12. A composition according to claim 10 or claim 11 for use as a pharmaceutical.

13. The use of a composition according to claim 10 in the manufacture of a medicament for the treatment or prevention of infection due to Chlamydia bacteria, particularly Chlamydia pneumoniae.
